United States Patent Application Publication US 2026/0258423 A1 - sequence listing, part 26

SEQ ID NO: 167803 - DNA, 46709983 bp, Homo sapiens (residues 31,696,067-33,364,280 of 46,709,983)
  source 1..46709983: mol_type = genomic DNA
tataatgaatagatctttctttgaactgcaagaaaaatgcttgtacctgatggtgcattggatcctgttgtattcccatcattcgtggctgaaactgatccatattttgatgctgtgtgtatgctggctgctgcatgccatctccaggaaagccactaaaaaaaggtggataatcttttacccattcaaaagcacaagcttctcagccacacttaaattacagaaacagagtgttgttcatgagtcattaacattttactgaaccatatatttacctatatattaaatttaatttataaactcagtattattcccaacataaaagccattttttggttttaaatcttaagaggatcccttcctcattcaagagaaaactaataccacaaattttacaaaacaacttcatagaacattgttgtcattgctaaatgttacttaggttatgccttacaactattaccaattttctatctgctgaggaataaaaaaaaaaactaacaatggtgcctgtggaggaggaggagaggcagcagcgggtgcagcagcagcaggcacggtggcggtgggtgcagggggtactgcggcagcaggtgctgtcgtggtgacggcagtggtatcctctttctttgattcttccacagcttctggctcatcatcatagtcaaatctatcaagcaacttctggaataattatgtcaatatttcattttaaaatttagactgattcactgcacaaaaaactttatgaaaacaagggatgtttaccaccatctagaaacccacattgtcaagcacaatcttattttcccttatgcccctcaggaccttggtttgtagatataaacaatttttacacagatgccagtttggaaaacacacagtgttttcattctgttttccttcctcaattgtaagtacagtgctttctattttctattggtgtatttcacaagtaatttagcagcatacatgtttttctaaaatactcatttccctagcctaaaaatgtctggaactttgtgcacatgaaaatgggtatacattttcagtcagcataaaatgtacaaaaagactgtcttattcaatcaccataatgcatatagaaaagtgtccatatactgcttcctcaagaatatactaatataaaaaaagaaaaaaaatggcaaggacacaaaaaagtcactagcagttcctaagaggttcgcttgcttctttctcataacttcacagcttaccagaaactttcatgtaaaaaaaaattcaagagacttaatgagatcacatatctagaagaacaattttaagtaagatttattcagaaaaaagataatgcttaaatacctactaatgtgtatcagatcatatagacttcatcacaagaacactgcaatgtagatagtttcttcttttttacagacaaggaaacaaaggctcaggtgattaagaaacatgattaagattgcacagtcagtgaatggtagaatcaggatgcggacactagtccttttgacttcaaagccctcagtctctggctttcaataagcaatctttcctttcaagccgtgctcattctgcttatagacttcaaccttaaattcctgaaccttgtcattctataatagttctgcctagagattctggttttgctttattgaacaacacatttctaaatcaaatgaaaagttctgtccttagacaacacagtatataggactaaactaagtgtaaagtgtgttttgggatagagctaacttatgtttctttgtagttctaggccaagtgagtaaagttcttacaaatgagcaagttagtattttctgaacaggaaccatcacagcccaggtaccttgctgttttacatatttttatttaaccctcatggcaacaataaaatatttttactaccatctttattttacactactgaacagtaaacattaattcaacaacaggacagtctgtaagtaattggagccaaaattaaaatctggtcaaagtcgcctataaaaaacaaaacctatgatcttcacagtttattacatattaatatgttctttaaagtttgaagaatactgctttaaaatacttaaagcaattaaaaaattaaaatggggtctacccaaaaagaaattttagttgctttttaggaaactgaagatctataaagtagctgaaacagacaaattatttccagtgagaagcttgaaacagacctttttagtcaaaagaaaagcacagaattcctttttctaaacttatgggccagtccacttaaggttaaatactagaggaattagaattcacattaataagagaaacatgctcaccatcatggcttttcctaaatttacctataaattcaaaggaattctatacactgacatagaaatgtacagagttttccagttcatctggaaaagtatgctgtgactgttaattttgtgtcaacctgcctaggttatgtagtacccagctgtacagtcaaacactaatctaggtgttgctgtgaaggtgtttttttagatgagaaggtgttttttagatgaaagtaacaataaatcagtagactctgagtaaagcagattactctcaataatgagtgggcctcaatcaatcagttgaaggcattaagaataagaactgagatagagggaattatcctcagcagtgcaacagagaaaccctggcctgagtttttagtctgctatcctgcaaattcagactcaggcctacaatgttaactcctgaatttccagcctgctgacctgccctgcaaatttcaaatttgctagtccctacaactgcgtgagccagtttcttaagataaatctatctttcattcaagaatctagatagacagatgcagatgtagattcaattactggttctgtttccctggaactcttgactaatacacttcatgataaatgaacaaagtttgaaaaagtatgagggggagtttgaaaaagagtgaagtgggagggggagagacgggataccaggaaatgaaagacagtctgtcacaagaattattatgatgcagaaataaacaaatatattagtgggatagaacagtgtccagagataagacacagaaacatacaggaatttagtgtataaaaaagtagtgagggagaactggctattttcaaaaacataatggtttaactatcttcaaccatattctaaaacagattccagagggactgaacagacaatcataaaaaaaaccttactagaatatagaaatcttttctaatacaaatgaggagttttcctaatcacaacataaaacaaaaaactaggaaaaccaaatatgtgagtttatgttcgtatgtgcatgcaaacaagagtgcaagaatatacacgaacaaatctgttcaaactgcagtgtggaattctttccttattttataactttctgtattatttgtttttttttttttctgcaagtatatatttcctttttactcaaaaaaatgtatccaacttttgtttaatcagtcatcactcataaatcactaagatataatgaaaactggtatttactaggtggatttttaatttagactattggcaataaagtccttctgtttttatagttaggatgttggaaagaatcagatattttaaagatgatgaaaccaaaggcatcagttctgattttcaaacttttgagtttttttgcagtgaaaactgaaaagtcaaatgatgttttataaagccataaaccaaataaaacagacaagagtggagctgttagggttaaatttcaatgagaagctctaagctgttcagcatatccatatccttagtggcagcttcttaaacatgcctaagaaacctataggcccgatagagcagctgagacactgacctaactcaaatcctcttttttgttgttgcttgttttttagagacaggatctcattctgttgcccaggctagtggcacaatcatggcttactgcagctttgaattcctggggccaagcaacccacccacctcagcatcctgggtagctagggctacaggtgcacaccaccatacccagctggttcccaaaccctcatattatatatatggtaactaaggttaaaatacacacacactcacacacacacacacaaataatatataattttatatatttttatatattaaaaataatacctatatattattaatacacacacatatatattaaaaataaataaacacagacggagtctcactatgttgcccaggctggtctcaaactcctgggctcatgggatcctccgttctcgacctcccaaagtgttgggactacaggtgtgagccaccacacttggctgtcaggtttttttaacagcaaaaaactgaaagcaatttgaatgtctattagtagtggaatggctgaactgtaatgtgcccatgtagtggaatactatgtattacatgcattcagtaaaaatgtagatctaaatccactattaaccttaacaacaacaaaaaagatacaagagtattaacaccaaaacaagtgggtatgtattatactcaattaaagaaaagcatgtatctgtaggaaattaattctgaaaagatgtaaggcaaaatgttacacagtaatccccaagtattggggttaatgaagaattttctgtttcctttactccctaactttttcttttttttttttttttcacttttttaattttacactagtaaattcagcttcaaaccctggaaatttttgcactgagcacatatcacatttaaaaccagggaaaataatcgatgttttcttgttgagggggaaaatctctcaaattacaaaacgacataatgaacaatccacagaagggatacagaagtgataatttccataactcaagttgagtgatataaatggtggggtgggttatgtgagagaaatataccttgtcaaatgcagttttctgttcaggtggggggaaagcagctttttgttcagatggttgtgtaggagttgtctttaactgagctgtgatagcctgaacctgagccatcacagcattgtcaagggcaggagactgtggttttggaggctgttgaaaagtctgaaggatctgctgaagcttaaagaatgggaaaaccaataaatcacagaacaaagtataatcatactatcaaaagttaatttaataaaaaaatgtcttaaaggtgattcaaagtagcataggcacagaacaaattggggaaaaaatccttttatgaatggttaaatttgttgtgaatgaatatacagagatataatgtgcatttcttaaggttaaaaatgtatgctgacaatgtcaatgatatgatggtcaaaaaaagagaaaatacactgaattgtgaacaaagtaagcataagttttctagaaaaatggaaaaattctctccgttaaaaataattttgaaatccatcagaaatgctagaattgtgagcaacatgagccacttagtagttctaaagtcctcttcaaagaggtactgtcatttctaagtgtgttgttcccttgtttatcacttctacattttccctgttcctcctacattacttctcttgtgaaggcttttctagttgaaaagcagacgtattttctcctttcaatgtgcttattaatgaagaatagaaaacaagaagtgacaacagtacctagtcctgcaaacaatttcacttttgagtagacagtttacctgttggccttgagttgtctgaaacagctgagccacagcagcaaaagcatcagagctgggcaactgtggtacagctgggacggagtttggagtggcttgtgtgggaggttcagaagaaacttttactggaggtggaggtgagcctaaaaaagaaaagggcattaaggcctaaaaaaaaagttaacctacaagttttcctaattaagcttctttgctaaaataacattttatccaatttaacaaagtataaaatatagagattgtggcactagagtttatactgtaacaactaccagaagagcagacctttattataaataggaattatggaaagaaaatcataccttccaagatgtaaactcaagtttccttcttatagaaaaattccttcaatacacataaactctgactgtttcatgtgcaaaaaatcataccattgtgtgagctcacagatacatctgaccataccttcattattggtaacattttctgctactggggctgcattactggttcccgctgccatgtccaaaagaggttgaataatttcaattttgaacactccatttttttgccaaaggttcagcacacgaactattttactctgttacgcatgagaaacacaaatatacaataaatatttgcataaataaccgattatactcttacaaaaaaaagagaggaaaactccctaggctaatatttccatactatgtgtgtttcataaacaaggaaaaaaaaaaatcagaattacaacctggttaaactaattagtctttcttcagtggtatcatctagagtaaggaacagagatggactatagacccagacaataaaaagaaatttattatttgacattttcattttattttacttatggttacaaataaactatcactgaccccccaaaaaaaagctatcttgaagtaaatgaaggagaatttcttcagagtaattataacagctaaaatatttaagcaactggcctgtagtcaaaacttaaattatgtggccaagcaaatatgaagatccagagaatatatgttattcatgggcacaacttttatctttactcaaggaatcatcttggttttgggtgtatttttcccacaagagcattcttccaagaatataaaaacagcacctatgacactgaaatttatatgctgtttattgtaaatgtctccgttcttcattattctgagtatgtttactagtataattcctcctatctacttatagtcagctactatatctgtaatgtttttctacttttatatagtatgttgtaaagccaactgtatatataaggaattaaatactgtagtctgattgctaatgaataccacttaaactttagtatctctatatgttggggaagaacatctattattggctctttctttctggaataaccacaatcagatgatcgctgtcttttcctactgcacaatttcttccttactcaactacacaagcacatctttccaacgatatcttctttaaagatgatgcgcctttcatattattttttaaaaattttactttactgtgataagaacacttaacatgagatctactcacttagccaatttttaagtgtacaatacagaattgttaactataggtacaaggttgttcagcagatctctacaacctattcatcttgcttaactgaaatgtcatacctattgattagcagctcctaatgtttcccttacccctagtccctggcaaccactattaaactctttgattctataaattttgttcctgtcatatttcaacagtatgactgataatcctgaagaactcataagaaaataaacacgaaatgaccactgaagaaaaaaactgttttgtttcaagctcacagacatcgctacatgaaaatcttatctggtaatatagtaggctccaaatatctaacatacatttaaaataatattttttaaagaatacaagttttagtttaaaaattaattataccttatcttcagatggacaaagatataaatattggaatgtggcagttatgtttttagagaatcttggcccaaaaacatctttatcagttccaaactgatgacgagactgtcgcacaattgagtcaattacatataatcccggaaccttgtattctggtttacactgcaaggataaagatgtaagatcagtacagaaaaagcaaagtcacaatctgacacccattattttcacatttatgaaacttttatatatccatccaatgattgcttttgtttaaaaactacttgaatgtttcagctctctaaatggctaacttgtcaaatttcccatgtctataatggaactaccattctcttgatactactgacccccaagattttactcttctttgatttctctacttccctacacccaatgtcccaaaatcgacattactttaccaatccttaagccagttccatataaattcacttattatgatagtctctacaattcaccctgctcaaaaaggtaatttttatctttcaaaattaacaaaacattttttaacatatcaattttaattctattacagtaccaaataaaaattaaaaacaagaagtagtttttggctaaccgaactgacaacagcagagaaaagcagagaaacagacacctatatatatttctggtggtagtggaaacaggtataaccctttatagaagacaatttagcaataaaagcaaagtcttatttaatccaccaattctacatctaggaatttatgcaaaaaaaaaaaaaattaggtctaacaactcagaaaatggctgtgtgcatcactgtaacaaccgcagaggagtattttgcaactgtttacgataaactcagtgggaaaagcagcctaacaaccagtattatgtccatttttacttttataaatgtacatgtacataaaaaataaatccaaatgtattaataaatattgcagttaatttgttgacagtgcctataggtaattttttccattttatttatttgtactttgatgtactactatgcaaagcgtttactaaccatcttttttgcctgttggaactttaacttttatacctaagccagtatacaagggccatggattagagacatttttataaacactgattagtaggtactacatgtcacagctccaggtcaggggttaagacaaagatgtctcagtctctgttttctattttctactgagacagatgtgtgccaatcacacagttataaaacaacagacagctgaactgaaaataattttattctgatgggaaaagggaaaaattgggaaaatttgacaaagtaatttcatttgaaatactcaaaggtgagttaaacacctaaatgtcaacagcagtcagggcaagggggtagagtaagcacttcaggtttagggaagggtcataaccaacatataagaaactgctgtgagttgagtgctaagttcacagtaagttaagtaccaattaatggtactgctaaaaatgtgtttttataaacttctagtgattaaaaagaacctctagtgactaaatttttatgaagtggtttagaaacaagcattgagattaaaatttacaaagtaaattacaaatcatattgtaactaaaatgaggttataatgagagatagttacctttttgatgaacttttctactatttgaactacatgcttataaagctgaaaagaattaagagaaaattactgttcagtttacttatttctacatttcctataattagaaaattcttaaaactctgaaatctatacaatctaaatattatcaatactgaatgaaccatgagaaatacataataaaaaatttaatattaaaaaactcagagaaaaataaactaaaaacagaaaactacaaaaattccccaaacagaagatcccttttcttaaattttaaatcaataaaccttcatgaagcagaatatttggcaaccttatgggacaaaaccaatggattagagctaaacaatgtagtttctaaaataagtcacattttaaagtgtgattttgggtaagacatttaacttcatggagcttgaattttttctctttaaataaaaatgaaactaaatagttggtttatgataaggaataaatgaaaatttaaaaaactgctttgaggctgggcgtggtggcgcacacctgtaatctcagctactcaggtggctcaggcatgagaatcacttgaacccgggagggtgaggttgcagtgagctgagatcgcaccactgcattccagcctgggtggcgcagtgagactctatccccctacccccaccaaaaaaccacactgctttgaaacaatatgttacaatgcaaatgcacgcttatcatgtaccttcagcaaaggctggttagggctctttgatttaggcctgaactaattcacaagttgacttctcatgtttaaaagtaataaatattttcaaaatttcaaaaagatttctcaaattgctttattttatcattaccttaatagctttaatagcagctttagtgatgagaatcatcttggctctagagatgggaggtttcatatccataagcgaaaagagcttaaaagacaaaaaacaaacaaaaagtaaagtttaactatttggctagtaaataagcacctttcctacatatctacatcaccacttggaaaatacaaacggggccggggtggtgaggggggtcttagcagctagggcagcaggaagagctttggtggccaggcacccagcacacaccctccccactgccgtgatacccaagaagaaggttagctctgccaaaggggtggcgaaggggtagtgaaatgaaggaagagcccaagaggcaatcggcatggctgtcagctaaacctgctcctgcaaaagtggaaatgaggctgaaaaaaggcagcagaagtataaatccttagacaaagatgtgcaaacaaaagggaaagggagggggagcaaagagaaaacagactcaagtgactaaccaagaaactaaagatttacctgcagaaaacggagaaactaaaaccaatgagagtccagcctctgatgaagccagagaaagaagccaagtctactcagtacataccatgtcttatcagtggtctctgtctcccctctcttcaatccagaggagtatttttatcaactattttgtaaatgcaagattttagtaggtctagaaacatttttaaggagggaatcccagttcatcccattttttatgtataaatgcttttttttaagaggtaaaatcattcactggttgtttactttattttttggtacaaccagaacagagtgtgggatgttgtattatgggaggctttgactgtcttgggtgtcagcttaacattccatagatgggggggttactttttatatcctataatgtctctactaaatatacaaatattagccagccatggtggcgcacacctgtaatcccagctactcaggaggctgaggcatgagaactgcttgaacccaggaggtggaggttgcagtgagccaagactgcatcactgcactccagcctgggcaacagagcaagactttgtttccaaaaaacacaaacaaaaggggaaaaccaaatttaacaaatctcacaacagtaaatctacagccatcaggtgcttccatgagacttaaccacatacttcccccaaagggttaaatccaaccaaaacatagagtccatagagggttataaagataaaatcctgacattaagaaacatatctaccttcttaaattattgtttttgtttggtttaaccataagcatacacttacctgggacttccaaaagatattgtgaagtaagtttcagagatcccaacattatgaaactcatatgaatcacatttccattctttcaatttatgtcaatattccaaatatggagccctagggtatgaacctttactagaccactagctaagaggctagactaaaatatgagtgttttctcagagtaaacagccccacctagcagtgtatcctaaaaatttagacaattttcacatcttttcaaaactacagacatcagtaacaattttagaaaaggcatggaatgccaaatataatcaataaaaaaccagataactacttaagcagaaaatataatttttccataagatacagaaaacagagaaaacactaagatattaacacaggatttcattttaataaaaggattctctaaatacggctgcaattcttcattgtattacttcatttaccaatgtaataaaaaaattatctttgagaataaaacgctcactaactgaaaggcaattagaaaagaaacagtaaggccaggcgcggtggctcatgcctgtaatcccagcactttgggaggcctaggtgggcggttcacctgaggtcaggagttcgagaccagcctggccaacgtggcgaaacctcatctctactataaatacaaaatggtggcgggcacctgtagtcccagctacttgggaggctgaggcaggagaatcgcttgaacccaggaggcggacagaggttgcagtaagccaagatcgcgccactgcacgccaggccaggcgacagagcgagactctgtctttaaaaaaaaaaaagaaaagaaaagaaaagaaaaagaaataacaaatccttaaaattatacaaaccagtaagaaacaatttaacatatttcaacttaaacacaaattctaaaaatatcaacactgtatgatttataaatatgtagcatacatttataaaaggtatattctgttataaaatctattaagacagttgcttattattgttctattttctataccttaacacagtgaaaggggatgcaaaaacaaaaacaaaaacccataggtcttaatgaacacacccacacacatttaattcttgggttgtctccacaactcttcaatgatttatgcaaaaatcctgaagaaactagaaaccctcccttccttgttctcaacctcctgagtcaagaccacttcttgatgtgattcatgccaaacacttaagacactgctatattttggatagattaaatctttaataataaagtagaagcaataaggggcctttccacgtagaaagtcaagagggtgaggatggccaggagccaagaaagggaatctaaatgtatatccaaggcagtctggaactttcatgcaggtacaagaaacttatgtcaaagtagccacaagattatttcataggagatgaacaaatgtgacgccctgtttactgctaaaaatcaaagctttgtgtgaaatctctaatttatggagaagctaggtaagaaagccttcacctgtctgttcttttcctgatcccttctcctcatttcctgaaatgtagagactgaggcccactgggcactggtatccccatcactgtgggggtgggggggagcgtctattttgatggttgattttgctgaaccaggtacttcctttcccattttctaatgattttgtaacatacaaactgactcttttcccttcccttctccttcccctgggaaaatacaacgaataaatacttactggtactgaaactgtcaaaaaaaaaaaaaagaaagaaagaaagaaagaaatgagcaacagtaagaactacttctctggtcattaaaagcttagagtaaattttaaggaaacctaagccagagctaatattcatctaatgcccccaaaaagcacttctttatcatttcagcagtaagcaactcactaaattaacagccaaatgaacatacaagacagactagtgtagcttttaaggaaacactctatagtctctatttaaaaaattaaaagtaaagactataccacctaacagtataaccatcattcagacaaaagaccagcaagagaacagtcaggtaccataatctgagacagctgcagagtattactacattccataaaaatattatttgggaagagaagaggtaaccaacatttgagtgctttaccaggcagcaatgagtttaagtgatatgttgtattttttacttaatcatgttaactaaggcagatctgttacacctgttttgagatgatacttaaaaaaaaaaaaaaagggtcatatctgttttagatgatgcctaggccatgatctgaactaatatttgttgattctaaagttcacactccctaacaacatacccatacccatacctgatacaatgctgcatacagactaaatttgtgcagagaccattaactatgaaaaggaatatagggggaaaaaaaaaatccaggaaggcatctgtgcctgcctgtatattgtctggattcagggataacaatgaaacatactgaatttaatttgggatgcctactaaatatctaggcagagaaagaaatatggatcttgaatgtgtaagagatccaggctagaaatggaaaggttatagaactatgaggatggattagaaggagcctggagtaagaaggccaccaagaacacatacaccaggctggtgcggtggctcacacctgtaatcccagcactttgggaggccaaggcgggcagatcacctgaggtcaggagttcgagaccggcctggccaacatggtgaaaccctgtctctactaaaaatacaaaaattaactgggtgtggtggcatgtgcctgtagtcccagctacttgggaggctgaggcatgagaatctcttgaactcaggaggcgaaggttgcagtgagccgagatggtgccactacactccagcctgggatacagaccgagactccgtctccaaaaacaaaaaacaaacaaacaaaaaaaccacaaaacagaagaacaacatacataccaaaaatttcaatgtagcagagaaaaaacctgcaaaaatgagcaccaggacaaagtagaatcccagaaattagagacatctggcatagccaaatgctacaagaggttaatcaggatgcaaaacaaatcttgtttatttagtttggcaattaggtgaatgcaagtgacatcagtttttgaaagtgattccaaattccaactggttaaggaatgagtggcaggcaaggaaacagaaatgcatttttggctcatttttcattaattcaacaaatatctgagagcttagtaagtggcaagctgagtgtttcgtatataaaaaggagacaggaccatgtttcaaagcttttttataaatgaccacccttacttatatcttatttgttagcattataaagtttccatcacatcactttctttctttttttaaactcctgagttcaagtgatcctcccatctcagcttccccagcagctggaactataggcatgtgccaccccaccagagaagtttcttttgggatgacttttattctcctttaccaacatttttcttaaaatttcaagctgtgcatttgcatttgatataatttacgaagaaaaacactacagggaaatacagatttttcaaaattggaggtttgcaaaatcaccttttaacagtcaatgaatgctgttaatattttattgacttatttaatgcacaaattcaccaaacggtctctaccttttgcaagacaaaaaagttccctgatacctacagcaatgccttcactgaacagatacagaaatccagaaattacgctgatactttgacatagaggatatgaattgatatactttcctggtaagcatgtacattgacactgtccatttggacagaaatagtaacaacctttatggtgaggcagatgttatcattccattttacagatgatagcactgaggctcaacaatctgctcagttataaagttaattaagtggtaaaattcaatctgtaatcaaccatttcccaaaactctaattcttttaactagtacctaacaataacaaaattatttcaaatatattagcccagaagaatagtgtacagatagtaaagataaaaaggactgtacagctatgttaagtggggaaaaattgcaatgtggacccaaactagaaagtaatatactaatatataattgttatgaggagttgaacccaagaattttttaaagaaaaaaattaagtggcacagaggtataaagtgatgtgcctacccaagcaacaagttagaggcgatataaattactaaaatagggtcaattttttgatgctttaaatgaccctacaatactgaatgtggtgacttaggaagaaagtgtcagcatgatttatttagatgatcaaaatactgatcaaatttcaatttctcaagactaaaggtcaatacactgtttttatgttttagaactcaattttaccttagggcatgagggaaagctttaaatagccagcatgttatacattcagaaattcttatttctgaatattgactcatccaaatatttccaggtaagacatgggccctctactgttgccagttctgctgagtttgattctcccatttgtttgttgctttttttttttttttgagacagtctcactttgtctcccatgctggagtgcagtggtgggatcttggctcactgcaacctctgcctcccggtttcaagcgattctcatgcctcagcctcctgagtagctgggattacagacgtgcaccaccacacccagcaaatttttgcatttttagtagagatggggttttgccatgttgcccaggatggtctttaaatcctggccttgtgtgatctgcccacctcagcctcccaaagcgctggcattacaggcgagagccaccatgtctggcctgattctcccttttttttttttttttttgagacaaagccttgctattgtcccccaggctggagtgcaatggcgcgatctcggctcactgcaacctccgcctccccggtttaagtgactctcctgcctcagcctcccgagtagctgggattacaggcgcctgccaccatgcctggctaatgtttgtatttttagtagagacgggggtttcaccatgttggtcaggctggtctcaaactcctgacctcagttgatccacccacctcggcctcccaaagtgctgggattacaggcgtgagccactgtgcctggcctgattctcccatttttaaaataaacactgatggccttctttataaaactgttaatagcatgaaatgaaagcatctaaaataatcagtgcttaataaatgtcttggtctctaactcctaccccctctcacatacaccaatccccgacttttgtttctcttaattaaaaatcaattatactgctcattgctatatctgttttattttccatttatgcatggtatatttttctcactctaaaacaaaatgaacttgttagttgtaaatgatttattactgagtccttacttgtgtctaaagcaaagttgcaatttattaatcttaaataaaagagttaattgtcatggtcaccaatattgtttgaggaatctctcaagagaagtatataatgttgtggtgatctaagattttgattgattttccacaataatttgttagaataacggtaagtgcacaggctcaataataactgcccgagaaatcttggctctaccacttgctacctatgagaattcctccatctgtaaaatggggataacagtagtccctccttatttagttaagtctaagaattaaatacaaacaatacatacaaaagcacttagagcaacacctagcacagagtaaatacacaatagatattaatgagtactacacgtaattcttttgagaaaaagagagaatcctggagttaatccagagcagtgtttttcaaactgtgggttgagatccaggaatgaattacataattcctactgtgtgtactgtggtcaaaaatatgaaggacaacagcccagggaaaaattattttgtttttagaaatgaggaaaataaggcccaaaataactgctagtcacctttcaataatgtgtaggttccttcaaaccattaataaatttctcatgggcaaaccggagcgggggtggggtggggggggcagggaagaagcactgccatgtcagaaaaaaacttcatgtttttcaatcaagtttagatacacataagtattatacacagagtagacaacagattcaaagataattcagttacttatgaccaacatccaatttcagtcaacaaacctcaggaaaaaagctattagctttatatatcaagtctaaaagccacaaaatttaatataattccaacaaaatctactagtgagaaaaaccagaaattgtggtcttctatagagagtgagaaagatttggttttgaatctgggtctggccatgcagatgactctgggcaaattaatttctctaagccataatgtcctcatttgtaaaaaggatatactgatatctgcttgataggtatcagtttcagttagaactaaatgagtttttgtatatggaatgactcgtactatgtcaccccgcagaggacaagtattcaataaacaccgttaggtgcagagctcccccaacattatagcctgtattcacaattaatgttatctgtgaatgaataaaaagtgtcaaagcagccagagaaaaccatgaaatcctcctgcataaaaataacaacagcccctccaaatacaagacttctttagaagggataagcatagtggaaaagaatgctacttgtcagcagtagatatgagcttggctctttgctttgtcactagcagaatgactatgaaaacgtctaaatatgaccactgccctgctgcatgacatatagaagcctgagacacaaaatcctctaaaaattatgaagaatgattcatcctgatccctcataccagtaaagagtttcaagtgaagataaagaagaacgagggtatctggcctgtgatacctgcagaattcacaatgtttagggattagtcaaagtaacatgggtactctgctatttaccagtggcataaaccttaacaagtttagtcaacctttctaaactccaaggatttttaaaatctgaaaaacaggaattaatgggctcacctcaccacattgttaggattaaataggataatgtatgtaaatctcttagcccagtacctaacacataagtgctgagtaaatggagcaaaacaatgtgaagataactagtatttcctctctgttctttaactattagccaaatgataaggtttccagatgatcctggttaattccctttaagtatggtatcctcaaatggacagggtccggacgtagtcctgcactgtgaattggcttttgtattagtttcctatttctgtagtaagaaattaccacaaatttactggcttaaagcaacacaaattacacttttgaggtcagaatctcactagcatcagcaaggcgacattccttgtaaaggctctagggaagaatctatttcttgtctaatcttgcttctacagggtgcctacattcttttggctcatggcctcttcttccatcttcaaagccagcagtatagcatcttctccttctatctcttctgttgttttatttccttctttgactcctacctctctagtataaggacccttatgattacaccgggcccacccagataatccaggataattaacccgtctcaacattcttaaccttattcacatccccagtctcttttgccttgcaaggtaatatatttacaggttttagaattagattatgaacatctttggagaagggggcattatttattacctaaaaaaaatagggcttaattcattaactccaatttgtaatcatctgaaatcttcaggctgctttcaccagaattcccatcaaaactagatcttcacattgactttgtgttggtttctaacagacctttcaacctatttagcaagtctagaagtgattttctgctatttgatgtagctccagctattccaatcagcttgtaaatttcatgaactcatttggtatgctttcctccaagtcaatgttttctaaaaattaaaataggacctatttgaaagatgaccttaactgatattccttgggtatttataaccagtcagctaaaatccacttagcaatactgtcatcctgcccatatttttctaattcattcataatgcaatcatatacaatacctttctgaaatatttggtatatagttttcactagacataacatactttacaaatggtagtctgttataaattgttagtgaatctgttctggctcttagtgactagcaatttctaaaattaataaaaactggcagacaaaagtaaactggcccagagtctacaatttctaaagtatgctttttcctactttttgaaataaagttgccgaggcaataagaattagaagactatatactaatctaagccatctttttaaaacttaaatctctcaagcaatatttctttctgaatctttctcaatgggatatttatccctttcttttcgaaacctaaactttaaaaaatgtattttcctaaatttactttgtaacggattacactgattatttccagtattccttcctttggtagtatgacctccaagatgacaaagcaattttcccttaagctcctattactatgtgaagttgaatttaaagaaaaaatagaaatgtttcctaaaagaaatacatatatactcacaatgacaggctagtattcaaatctccttcctgttagatgcaaatatcaaagcatttagttctacagtctttcctcctctttcatactcaacttaatatatcaaagacactgtcttaaaccaaatagttaaatccaacacaacttttatgtttattagcaacacatagacactgtataacaaagcacacgctaaatttcttaacaaaagataattttaaacaagttttaaaatcatctttcctgtaaagatgctttatccatctaatttaaacctgaagacaactccataaaacactactgctagaacaactaggtaagggatcatgtacagtccttttcttaacctggtatttcatcttatgccttcaatatataatttactaaatgtgtgtctgggttaatacttttttaatatcaggtaatataatggggcgaggaaagaaagccaatcacatgttaaacaagtaccactatgtcactttacctgaaagcagaatactgtgtatgagttaatcaatggtacatacacacagtaagaggtacaatgaaactgaaaaatgtacagaagcaattcatttaacaaacaaaatcccaatatctaattaacaaacacaggaaaaagtgttcaaccataccaatcaataatcaaagtacaaattaatacaaggagataaaattcttacattatccaacggacatgcatgtggactagcataaagcaaaaagagtactgggctggtgagatctaatggacgagttttaattccgaagagaaatttaaaactataaaacaagaactaaaaaatgtccataccttttgaaccagtaattctacttctagaaatttatctaaggcaattattagatattctcaaattttccacaataattattgagaaaatgacagagaatttcatgctattaaaaagatctggtaactacataaaaaattccaaacacaagtggaggagaaaaaaagacaaaggaaatactctaaaatgctaatggtgtttgatgggattgttttatctactaattcaaatttatctaacttgcattaatttttaaatgaaaacaattaaattcatggatttaaaaatgaactttaatttgtatctgtctgagatacatctttgttcaacttttgattataaatataactaagtgataaagaaatatggttatacagaatcaccattatcacataacttgtccacagagtaaatcttgtctttgaagctcagttactatgtttaaatcagtaacttgcaaatctttaataaagcctttcaaaattagtaaatttttaaattaaaaaattaaattaaaaacacccctccccccacaaatccttacaataactgaagccctgtggataaaatgaacaacatacactgtgcaaaaaaaaaaaaatttttgggaaactgctgccatatatatatatatatacacacacacacacacacacacacacacatatacacatatatacacatatatacacatatatacacacacacacacacacacacacacacacacacacacacacatatatatttttttgagatggagtttcactctcattgcccaggctggagtgcaatggcgcgatctcggctcaccacaacctccgcctcccaggttcaagtgattctcctgcctcagcctcccaagtagctgggattacaggcatgtgccaccacacctggctaatttttttgtatttttagtagagatggggtttctccatgttagtcaggctggtcttgaactcctgacctcagttgctctgcccaccttggcctcccaaagtgctgggattacaggcgtgaggcactgtgccaggcctatatttttttcaacatctcttcattaaagaaagtgtccctttaattattgatatacagcttacttccatataaattccacttgcttgtcacagactcaaaccttttgaaacctaaacatttaaccacttttccacttgcttagaggaaggtatgaaaacaagataaatctggcattgtcaatatgaaatactcctaaggtagagaaaatttacaaagctttttctttttggtacagatgggattttgccatgttagccaggatggtttcgaactcctggtctcaagggatttgccagtctcagcctcccaaagtactgggattacaggcgtgagccacctcatcccaccccgaaaagctttttaaaacaaataggggaaagatgctctaccattttcctgctccgactgagcagagtcttgtttgaatgtaaacattacaaaacagttccatctacttctgtacaaaatttactcttcagatttcaagagattccaaaccaggtactttcataagcaacaaaaccgcacataatattcaaattcaaaattttcatacttacttcttcctaaatttctttactataccatattctcctccacaatcttgttgacttttcttctagttccggaatttaaagaaatgttttaccaaataaacacatggaattgctaaattacatttaataataaatataacaccatttttaggttaactacttatatttctatgtgcagtaagaacattaagaaaacagaatataggtggggcacggtggctcatgcccgtaatcccagcacttcgggaggccgaggtagacagatcgcctgaggtcaggagtttgagaccagcctgatcaacatggagaaaccccatctctactaaacatacaaaattagccgggcgtggtggcacatgcctgtaatcccagctactcaagaggctgagccaggagaatcacttgaaccctagaggtggagattgcggtcagccaagatcacgccatcgcactctagcctgggcaacaagaacgaaactctgtcccaaaaaaaaacaaaaaacaaaaaacaaaaaaaacacaacagaatataatacacaatggtttaaacttcatctgcattatttttcactctttaattgtaccatcgagcccttattctattaccatttactccgggcagaactaattttctaagtattaatagttaatttctgaaaacttactctataaagcatgtcctaatgtattattattcttctttttttttgtttttttgagatggagcttcacgcttgttgcccaggctggaatgcaatggtgtgatctcagcgcaccacaacctccgcctcctgggtctaagcgagtctcctgcctcagcctcccgagtagctgggattacaggcatgtgccaccatgcccggctaattttgtatttttagtagagacagggtttctccatgttggtcaggctggtctcgaactcctgacctcaggtgatctgcctgccttggcctcccaaagtgctgggattacaggcgtgagccaccgcgcctggccatgtattcttcattttacactacctcccctacaatttccaagggtctagccttcactcaaactttccacttttagaatcaaggctgtatacctcaccagggtttttaaccctattggttccagcttatcacattaggtcattttccaaatgtacttcccaaatcaatccacaacttcttccttttcacttgcttgaaagacaggccaggaggtgattttaggaaatgccaaatgttttatccatgccagtgctctcctttagcagtacaggtgccatacctcagcatcacatttactgtgcctcactaatgaacttctggtctccctcccctcacagttggctattaaaacatttttgtgaattaaacacttcttcctagacatcaatacaagaaataaaaattgattccaggacataaaatcatttaattagaaaacaatattaatgctagcatttataaaatccttaatgagttaaaatttttaatggagtataaactggtaaaaagaatagacatctttagttttaaatgctgattacatttactgcattactgtggatggctcaaaaacttaaccaaaccttgttattcttaaactgtgacaagtccttccaaaagtacacattattttgatagttatcacttgctaccatgcttcagacgtataaaagctgttcactgagtcttctccccacataaatggtccattagataaggactcactgctcaaaaacttcacagcagccatgtggggctgtggactagactcagatgggctcttcaaaggactgtgtcaaatctcagaactgttacttttacactgtgtgacctcagaccattcgccaaacttctctagtttccttacctttaaaatggaaagaatgcaaagacatgtacacaacacctaactcattagccagcacctggttatttaatgggcaaatgcaggattcttttcttgtccttcccttaaactgttcccactggattactccttaaaatagtacgtcaaaactaaacctatcctttgaacaaacttaggattcgggatcaacaaaataatttacagagccatgcagaggccgctagatagttttcatcttgacagaaaatcagataaggcaagtaaacaacaaaatggttatgatataacctgacatttctgtgtattttacaacagctttgtgatataaatcacataccataaaaatccatccatttaaaatggacaattcaatggtttttgatatattcaagagttgtgcacccatcaacactttatagagtattttcatcacccccaaaacaaatcccatccccattaccagtcactctccattcctccttttgctgtctgccagccaataatctactttctgtctctacgggtttgctttataaaatatatccctatatttgttaaaatagatagtggtaaaagaccttcataaagatttggacttatttcaactgatccctaaacttggctgccctatctaaagtgatttaacattcagcatcttttaatcaatgtaaactaagtcatgtatggccattaaagtttaaagactattatatatttcttaaaggctttaaaacggatatcacagtaattttcggtattacaggtttcctttaagcagggtattataattctactttaactgaaagtcaaaaggaggaaatatagaggaacactcatgacagaatgcattaagatatactgggcatattgcagagggagactttacagactagtggattggtcaactattgctctttaatgcaactgcatacctagagtgaggcaagaggagcagtccacccaggtgcaggcagtaagtgggtgaactatcaagactaaataaaacagcaagactttgattttgttcttttattaacatcaagcaagagcaattctttttttttttttttttttgagatggaatctcgctctgttgcccgggctggagtgcacaggcacaatctcggctcctcgcaacctccacctcccaggttcaagtgattctcctgcctcctgagtagctgggattacaggcatgagccaccacacccagctaattttgtctttttagtacagacagggtttctcaatgttggccaggctggtctcaaacttctgacctcagatgatccacccactttgacctcccaaagtgctgggattacaggcgtgagccaccacgcctggcctgagcacaggcaattctaaaaaacccagggataaaatatatcgcccccaaaatattttggcaatactctttaagttttaaggggttgctgtggttactgctgagttttaacaacataaaaatgtcaaatctgcacatttttattacataccctttaataagcaatccatcttaattggaagtttattaggaaatcccccagttatacagtcagttcccaacacatgcagatttgatatacctgttcatttggagagtaagtacaaaaaggttcaggatagcttcagctctcctcaggctcagcatgactccaatcctattgtacctatatacattcctctgtttaaatagtatattcaaaattatagctgtgtccaatttttctgagataaattttttctggcataaatatttacaaacaaccagaatcggcctcaaacaaatatagagataaataaaactttaaaagtgaagacctgtgaacaaaaattatagagatgccatcactaagcaacaaagtacaaggaagctgtacttccttgtacgtgaatatcaaaagtggttatcaaatataatagacatttacattgaatttttaggtgataaccatttcagtaaaattttgactgaggcatttcaaagtcattacactcaaggtcgggtgtggtggctcacgcctgtaatcccagcactttgggaggctgaggcaggtggatcacgaggtccaagttcaggaccagcctggccaacattgagaaaccccgtctctactaaaaatacaaaaattagccgggtgtggtggcacgtgcctgtaatcccagctagtcaggaggctgaggcaaggaaaccgcttgaacccaggaggcggaggttgcagtgagctgcgattgcgccactgtactccagcctgggtgacagagcaagactccatctaaaaaaaaagtcattacactcaatgctgaaaaaaatacatggatagtattgtgatttctagaatttattgtgaagtatgcttataaatcgctgccaaacacagtatgatgtttaaaacttcctatttgtgtatgtgttgctgtatgtacaacattttgtaattaaaattaattaaaagtgctcttaactgtaggtgaaaacagatgaataaatctggttgtaactgtctaccgaacacaaatatgtgaagatcaattttaatagtcattgacaaacctgcctaagacttttaaagatagtggccagcctggccaacatggtgaaacgccgtccctacttaaaatacaaaaattggccgggcccggtggcgtgcacctgtaatctcagctactaggcagggctgaggcaggagaattgcttgaacccaggaaacggaggttgctatgtgccaagatcatgccactgcactccagcctgggtgacagagcaacactccgtctcaaaaaaaacaaaacaaaacaaacaaaacaaaaaacaaaacaaaaaatcctgtaacatttgtattcattattgtgacatatcagtatgcagataagtttttccactatttcaaaaaacatatattaatgcaatttaaaagtctggtatgatttatatgatgtgtgtgtgtgtgtgtgtgcgcgcgcgcgcgcgcgcacatacagttcaagttttctttctggccatttccattactcatttcatgattatttctgaaaataattttgctatacaaaaagggtgtgttttaaaaaaatctgctctggatgtcaaatatgccagctataccactgctctccggtctcttccaactgggattattgacccacatggatttacaccaagaatcatcaattacccaaacataaattataactttcaagaggtatttggatggccatccacctttcactgagccctgctgttctcctctaccccctagtaaaaacccgggcttctaattcttaactccactgctgagttacactggttttcttcctgaatttactactaatctggtacagtgcactttactggaatatagggtttctgtatacttacttatctatgtcttaaaaagcaccaataaaaagctcaaactactcagcaatgaaatgtaatcaataaacgatgcaaatattgaacagaatgaaggtgatcagggtataataaattataatattgtttgtaaaatctcttgtagttctcaaaatcacagcagcacagtattaattacacttaatattaacacagaaatgtagacatgtctctcctaagctctcaacagatcctggtaaggcctcttctaacgcaaatttaactattacccacctctatattttctgtggtttgacagaaacataatactaattaatataccaatgttaccaaaattttgaactgttaataggtaagctgcttattctgctatatacctgacaacacagtgtagttttcagcttatcatgaaagttgtatgctgttgctctgaagtgtgctaaaaaaggatttggcatattgtctcaacaaatgttatgaataacactaaaggttcattactgatgtaacattttttccctactatgttatcaaggtgtatttcaaatgagatttgagtgtgcgcagatatgtacaaaaaagttacttccaattctgaagtaaattatatttgttcgtgccccatgacacagaacaacctacaatttttacagtggcttcgtatgtggtaaagaaaacaaacaaaaaaaaactaccaattgtgtcatctctctagtaggtacagttttaacctgaattctgtttcacaaggtttagaaaccaacttttccattattctaattgctctctgaatcaattcctcatgtgttcatgtaattttttctgaaacagaatactagacaaaatgatagactagggagggaaatacttacaacaagaacatcagtgataaaccccgctacagaaagctctgaagaatcactttatcgcaatcactataaagccagaccaatacccttgtcagaaactaagaattccctgggtcaagaaagtagagaaagaaaacactgtataaccaactttcaacattcaaaaactcctgggataacagcacaacatggtcaacttttgcaagggaaatctccaattttactgccaataatcgacctggtcctctacatcttttccatacagtaaagaactttgaaccctctgtctacatgtctttagataaacgtctcagaaatgatcaaaccccaaacattaacactacaggttaaaaaaaaaatacttaataaggcatccccatcagatgaactaaattctagaagacaatcatccctagtaatcaacaatagtcatacagaacaatttacagtaagagaagggagtaccaagctcccactaagatgtaaaactcaactcttccttcagaataacatgattgacagcccaactggataagtgtaccaatgtcaattcgtacattaagtattcataaagcctaatttatgtccaattttaaagataaccatgaatatacaagtactcgcattttttttctgtactgcaaagtagcattatatgcataccacctcagcactgcagttctcaaagagtaatccaaggacctctgagaggtctttgagtccctttccgtggtttgaggtcagaactgttttcatatgaatactaagatagttcttgcctttttgttcgttttctcagaagtatgtagcagtatattccagaggctacctgatgtgtgttactgcaacagactgaatgaaaaagtggaatgaggatccaggttttattaaaccaaagtttaaatgacgtgcaaaaatgcaaaatgatgtcactctttattaatttttttgttttagaaacgttacttttcattaaaaatgttatttatattaacatattgtaataagtttattgttatttttagtaaattaataaacacttgcatttctcagtttaaatttctaatatggtaaatatcaataaatataataaccaatagatagatacaaaagctctctgtggcccttaacttttttttttttttgagatagagtctcgctctgtcgcccaggctggagtgcagtggcgcgatctcggctcactgcaagctccgcctcccgggttcacaccattctcctgcctcagcctcccaagtagctgggattacaggcgcccgccaccacacccagctaattttttgtatttttagtagagacggggtttcaccgtgttagccagaatggtctcgatctcttgactttgtcatctgcccgcctcggcctcccaaagtgctgggattacaggtgtgagccaccacgcctggcggtggcccttaacctttaagaatttaaaaggatctagccaggcatggtggctcatgcctgcaatcccagtactttcagggggctaaggtgggctaatcacttgagctcagaggcttgagaccagcatgggcaacagagccaaaccccgtgtctaccgaaaaaaattgaaaaattagccaggcatggtggcagaggtttgtggtcccagctacttgggaggctgagacaggaggatggcttgagcccaggaggcggaggttgcaatgggtggagtttgtgccactgccctctagtctgggccacagagccagaccctgtctcaaaaaacaaataaatgggtctaaaaccaaaaagtttgagaacagctgtcctacagaaattcctacacatgcgcaccaggagacatgtttgaaaagttcattgcagcctgtcagcaaaatattaactaatcttaatagacagtattaatatttgagcaaacaaaaaaagcaggtcaaagctgcagtaagccgtgctggtgccactacactccagtatcagagaatattatatattgtttatggaccacagagattaatactaaattatttgattgcctctcctgcaagtgggaggagggttggggttggagtgaggatgaaaggaagactttatattttatttgtaaattaaaaacacaaaatagtaacaactgtatattcttaactgttttattttctctgcactatttttgtacttttttttcttttttttaagatggactctcacactgttgcccaagctggagtgcagtggcccaatctcggttcactgcaacctctgcctccagggttcaaacaattctcctacttcagcctcccaagtagctgggattacaggcgcctaccaccaggcccagctaattttttgtatttttagtagagacagggtttcaccatgttagccaggctggtctgtaactcctgacctcatgattcacccgccttgggctcccaaagtactggaattacaggcgtaagccaccgtgcctggactatttttgtacttcaaatgtcttaaaactgcagatgatgcaaaaaaagtgggaggggcaagatacaattcttcaggatttaggcaagatgggttaaagactaaaaatacaatcaatgggttaaaaaacacaatctggctgggcgcagtggctcacacgtgtaatcccagcactttgggaggccaggagggtggatcacgaggtcaagagatcaagtccatcctggccaacatggtgaaaccccgtctctactaaaaatacaaaaattagctgggagtggtggtgtgctcctgtagtcccagctactcgggaggagaggcaggagaatcgcttgaacccaggaggcggaggctgcagtgagctgagattgcgccactgcactccagcgtggtgacagagcgggtctccaccttaaaaaaaaaaaaaattccatactctttattctattccacaaactttagcaaattcttcacattcagaagtatataaactatacaacagacaccattaagtattagccataattgataactgatactttttcactacccttttcaatctttcacaacacttaatacatgtcttgccataaaaattctccaaatattctgttaaatgggtatctttaataacctctcttatcttcctttccttctgtatcagagatggacgtcttttactactgcttctgatttgtcccatttctcttatccataattttgcttcaagttagccatcccctcttgctggtaaactatgctattctacacccccttccttgaaaatgctaaagcctctactcccatctaaaagactagggattcaacactactaactaaagctaaagacttatatatatacatataatacaaacaaacgtactgcctatcaccagtgcctagtacattgttaactgcccttccttccctcatccttaagcaacatttccctctaatccctcaaaaccaaacctctaaagactactttacactagctacctcttatttccttatctcccatcaccattcaaccctaaacctcaaatcctgttatcctcaaacatttcagtggccaagtcccctcatactatacaaaatattatcttcggacacaattaaattggagagatcccaattcaaatcctagttctgccattaactagcaatatgcccttaggggagttactatttattataatttcttggaaaatcagtttcctcatctgtaattggacgtctatgcagggttgtgggaatacatattaaattagatatgtgtacatatctaatgcctgacatgccattggtcttatattaattcctttttctccccctttcaattttcccccatctttcccatctgaactcctggatgtctccctctatctcttagttgcttccaagtttaagtcctataagcccaactacttgccaaaaatttccacatgattgttccacaattaacctgttcaaaaatcaaacacattttcttctctactaagtaggcttttgatgacttgtgataagggtatcaccactctctcagcccttaggatgtggggacaaaaggtgcttataaacctatcagatgccaaggtccatggattcctttggcccacatccttttcctattctccattcccactatacacttgccaagttcaggttttacttatctttcctaccaagtctctgcctcctacaacacataacactacgaacgaaacagttttgattacattatcccactgcttaaaaccttcaatgtttacccacagcctaaaactgaaattcaaacacattaggcaaacatgaaacttgtcaggcccaaactactttaccatccttactttccagtagccttcagaatcaaaatactcacttttcagcactactgcccttcgatcactgcttcctacatcttctgaaatcctaaaactgatacctgctcctcttcccaagccttcacttatctccaatggctatgccacactgcaatggaaggatcccaaaggaagctgttctacctcctattaaaattatttgtctaagtcttatgtcctctattggattagacttttaggtgactgaaatccttggtagctctacagtattcaggacatggctgtgcaggtgagcaggcactcaaaagtttaagtgaagatcagatctcagagattcaagattatatggggaacgaatcaagaacatttcatgaatggggagaaatagttgagaagcactacaaatcaagtaggcacagtaagatgaattttaaactcagattaatttctctagaggagttttaatttagcagaagagagctggcattctttgcagttcataaagactaggaatagaactgaaatgaactggaaaatgaacaatgataagaaaatgctcattttgcacatttaaaaggtcaaatatcacttccctttttcaaggaatcaataccattcctaactttggtttttcaaagtaaaaattactgattgtgccttttcaggattaatagaaaatactttgcttaacaatgtgcttgatgtcaacttccataatgcctgaatcagaatacttctgatcttaagaataaactaaaaatcctcttctttcatcaaaaacattcattcttccgattctgaaataaatttttaaaatacacattcattgttgggagaaaaatgtacttgaaatattttaactattgttgtgccatttgtttaaattctcattcaacaattatttgcgaggcacctgttttgattggtagagaagcggggaaaagaactgaaacttcctgccctcatggagccaggagccaacatgccagtgaattctaccttcagaaaacaatcagcttccaaccctgaaatgtttggagcattatcacaaattctctggcgatcaaaaactaggacatattatttttattgttttgaaaatcatcacaactgaacttttacaagacactgtccaataccagttgcaacttctgcagttagggcattttatgtacccatcaattgaagaaaatcacttttaggataatttatatggcaataaattgtctcaactgcagtgtaattggaaagtcccatatattatggcactgcaaatctaaaggaaagttattgcaccataattgttacaagtaaacctacaaaatctgtgagatgcagcacgtttttaacgccacatccacacatctcgaactacaacatttgatttttcaatgttgctttatctttggtatttggaaagggaagacaatacaactcaacccatgacaatagttcccattctgtaactgcattttaaatcatcaatggtcaagtctcctcctcccaaatcgattctgacaaataggatgtatggactctacactccaaaagcaacacctggaatgatcagagaaacaactagagaactttaaggccgcaggcagctttgttcccagtttggagaggttttcacatgtaaatgtcctcgtagaagggagccgaggattaactacctcgggagggggtgcgagggtagggaactggaggacaacgccagctttctagcggactaaggcggagcgaatactcttctctcccattcaactttttaggcgtcacgttggggccatagagcctataagagggttatgttcacgactttaaattataacgagccaccccctctccgtttattagccctatttcccaagtgcgtgaatcccggagaagggggatgaacaccctcttcaactcctcccagacccgggatcagagtccagccgtcgacgcgccgcggcctgagcaacaggagagctgaagccacctctccgccagccccacgaccggcagatgctcccgctcccccgcccccaaccccacacgcccgcccgcgcttctttcttagccctttgcgggctcccggcactgcgaacccgacaacggggctcgcggagcagagagcgagggcgcccagacccgaaaaagggccaagttagaggaacaggcacagacttgggctatgggaggccgcaagggggcgaggggagaagcccgaggtcgcggtccgggggtgggcagtggggggaggggtgcggggtcagttcccgtggtcgccgcgacctctcccgggccacaggccccgctccgcgcaggccccgccgccccggaaccggggcaggaagcgtccccacccggaccaaagctttaaacctccggcggcgggagaaacgagccccggctcccgcagcaggcccggcacccccctgccccaaacaccccttacctcctggttgaaggcgttgacggcgtccatgttcgcgctgcggcggcggctgctccgggcccgccggtcacatagacctcgcgccgcggcggagcggggctgggaaaccagccgggcctggtggccggggggaggcgacgagcggcggagtccgaggcccgggcaggaagaggctgcgcccgaagcggcgaggcgggcggccgaggcagaggcggagaggtggcgggccccctctcagtcccgttcgcaggatgaggaaaaggaggcggcggcagcgctggtcttcaacatgtccgtttggtggtggcggctgcgctctgcgtctcgctgacacggccccccgcgccctcacgcactggctcacactggcccggccggcgagcgggcgggcctctctctccctctctccagcgggatggcggcagcggcccgagtccacgccgcgcggggcaccctgggacggctcaggcctcccggcgcttcctgtgcccggcgttcgccccgccccgtcgcgctggccccgccccctccccgcctcgtcccgccctgcgccgccctgcaccgccccgcgtgcagggctgctggcgcgtgacgccgggacgctgggcgctttcccgccggcggcggcggcggccgcggccgcgggccggggagacggccttgcagagcgcgggatcccagggctgcgagggtgacccagagcaagccctggcgcacgcgcgctccgctcgacgcggtgctcccggggtgcgtctctgcgaaacgctcggccctaaccggccctgcacccggcgggggcggcgggcactgagccgctggctctcggctgccgcgaacaaagggcgcaggatttaacctcggctctctgggcgtgcctttgcaggccctcgtgcgctctgctggggaaaagaaaaaaagcttctgccaatgccagtgcagctgtgtgtccgctgtagttgtgcaggttaattctgcgcgagcgaaaacaccgagaaagacgttcaggcactggatatccacgcaggccttaaggaacccctgtgcagccttgtgccacgagaggagtggattcactaactttcacgctgattcctcaaaccaagttgtttcatttttggccaaaactctttatgttgatcactttccttgagtacctactgtctgcctagtgttggagacatggaaataaacgataattgttttgcctgaaaacagcacagtttagtggagaggacagacaactgagcagatacttaccaaagcatgcttagtgttagggcacaggccctgggaaacgagaaagatgcgcctccgacaggaagtccaggctacatctggagggaggagaggcctgcagagcctgatgaggactgccaccatcacctcccccgaaggaggaccagctggagctgaggagcaaggtggactgagagaggagagtgagaccataaagaggctttgctcttccagagtttggattttgcccccataaggcagaggggagcccttgaaaggggaaggtggagtgatggatgcagtgttctctcagaaggatggtgcaaagtagtaagaggagacagggaaagaatgaccccagccccctgggaaaatgagggctgaaggtggtggcgatagagaaggaagaacagatgtttaggaagtggagtggaagggctgaggcagagtaactgtgaggttaataaagggggtgtcaaggaggatgcccacagcctgacttgatgaatgacctgggtggtgggtttatgagtcaacgtaggggatttatggggaagaaggcgtgggtttgagggaagacagaatgatggttaacacttgtcgcttaccatgtgccaacgtctgctgacatgctattctgtactctccgtaacaggcttctgggtgaggtgtccattagtaatgccctcattttataattcagggagtgagttaattaatgtgcccaaggtcacacagctggatcatttccctttggtgcctgtggagtttgagctgcgcctgggacaagtaagtgaggatgtctaggaggcagttgggtaaacacttgcagagtcaggagcgatggctgagatgatagaaatctgggagtcattagtgcacagctagtggtggaaggagctgaaatagatagggggaaaaagcccaggaacacgggtatgtaagggataagttggaggcaagaagaggtgaagagagagctctgaagtgatcagctctgtctggtgcttggagtagaagtccagcaagataagaattggaaagtgcctgacgggtgctacatgcagggagcttgtcctgcgtgtaggctggcgtggtgagggcaaaagctagactgatgtgtatcaaagaggggaaggcaggcaggagaaagtttatagaaacttggctgtgaaggcaagttgtgaagacaacagaaaaaacctgcaggaggaagtgagagtgtttgcttgtgtgttgttttgttttgagatgagagtaatgtactcttttttaaaattattttattttattattattatactttaagttttagggtacatgtgcacaatgtgcaggtttgttacatatgtatacatgtgccatgttggtgtgctgcacccattaactcgtcatttagcattacgtatatctccaaatgctatccctcccccagagtaatgtactcttaattacttgttaaaggaacaaagaaagtagttttcaaattttattttcgggtccactcatcttctacttcattaccacttcctatcactactttttaatcttccaactgaactaccattatattttccaaatccatcttgtttctgtaacagctgtcatccgcaagaccactaacattgcattagaaagtacagacatgaggctcgcgcggtggctcatgcctgtaatcccagaatttttggaggctgaggcaggcagatcacttgaggtcaggagttcgagaccagcctcgccaaaatggtgaaacctggtctctaccaaaaatataaaaaattaaccaggtgtggtggcacgtgcctgtaatcccagctactctggaggctgaggcaggagaatcgcttgaacccgggaggcagaggttgcagtgagccgacatcatgccactgcactttagcctgggcaagagagcaagactccatctcaaaaaaaaaaaaaaaagtacagatgtgagtagatctctgtttcctaccctttggcatttggcatttggcatttctggagatctactgtctaccaaattctgtccaagatccccacaccatgtttccagcctgttgccagggcacaacccaggttttgtcattccctggacacatctgggaattgacatggctgggcctttgctctcatagaaaacccctctctgctcctctatataggcaggcccatttaacatctagttgatattgagatgtcactgccttttcattcattaatcatgtattgagcatgtactttgtgccaggcactgtgcggaaaagcttccccactctcctttcagccagtcttggcatcttccaccatatgcttctatgactccaccatagcacctcttaccttgtattgctgttatctgaaaaaaaaaaaaaaaaaaaaaaaaaaaaaaaaaaaaaaaaagtctgcattattctgacatgatgtgcccccgctgtatctctacctgtttctgtgaagagtggcagaacttaaaaatgggtccacaaagccaaatgagatcccccttccccaattcatacagtctgctttcctcttgtgagtcagggaaatagatctggctaaggaaggatgaagtcttaagctggggttggaaagggggacttgggaggagagtagtgagttgagctttggacaggttgccttgggactcggtgctttacagctattggggcctataatggttgttgaatgaggaagtgatagtccaaagggggtattttctgtgtaccatcctactgagatttgaatgcacaagaaacaagatttggcttctaagatccatgtgcttgagatagttaacggattttggaggttctttcctggataggattatttggtttttatgttgacagtgtttgagaggtcttttagcaagtagttggtatcagctagactttgggtgccttggcagcattttctagcattttcctgttctgaagacagcagcacctgtatctgttctggaacatctggtggccatttgcacagctactgctggacttccatctttatctctccaggcagacgagtcgaaccttccaataggaaattttgggtaaatgacaaaaacttatgagggttgtcctttgtgagcagactttgaagcagtaggaatgtagcctattgaaaagatggccagaggttcagaaataagcgtgacggataaaaatcagcaagacatttaatacatctgcaaacttgccttctttcaaagaacattgattgaaacagattcgtttgttcataatgtgggtgtgaaaatagttctgaaaagccattctaaacaaacttatgtttttaaaaagagtagatgaaatctgtttgcggaggaaggaaaagatgacattcaggaagcaatgttctggttaattctgtgttcttcaaaagccagctcattttcttgaaaagaatgctggccacaatccacaggtatagagaatatggagagaaagcatctcacgcctgaagagtccaataaaacatttatagataagaatttaagagaatatgggttctttctgttttttgtttgtttgtttgtttgtttttgagacagggtcttgctctgtcgcccaggctggaatgcactggtgtgatcatggctcactgcagcctcgacctcctgggctcatacgatccttccacatcagcctcccaaatagctgagactacaggtacaagcctccatgcccagctaatctccctgtgttgcccaggctggtcttgaactcctgggctcaggcaattcttccatctcagcctcgcagagttctaggattacaggcatgagccaccaaacctggcctaattttaaatttgtttgtggacagggtcttcctatgttgtccaggctggtcttcaactcctgttcttaagcaatcctcctgcctcggcctcccaaagtgttgggaatatgggtgggaatatgagccactgcacccagccttgaaaatgagttctttctaatgctttatgccatatactttctggagagagtataaactggctgtattatatgagacttctttctccttggtctgctttccttctctggccagcctcctggattcaagtcatttgtcagatatgtgtatcgtaaatacttcctcccagtctgtggcttaccttttcattatcttgcctcctcctctctctgaagctttccctgacacctctgtgattcttcttcctccccacttagggatgtgactgaactctctcctggtttagaactgcatttcaactgcccactggggaattccacatggggatccctccatccccaagggacccacctgactccttttgtgcatcttctgtcttcatgccctttatgttgttggggccaaaacaatggaatgaaatgtgtggaaagcaggaactccaagaaggaagagctcaacggcagttgggcaatgggattttagggaattttcattttctttttaatttttcagcatttttcatactcctcacagaaggcatgtatcacttttttttttttttttgagaaggagtctcactctgttgcccaggctggagtgcagtggggtgatctcggctcactgcaacctccacctcctggtttcaagcgattctcctgcctcagcctcctgagcagctgagattataggcatccgccatcgtgcctggctggttttttttttttttttttgtatttttagtagagatgcggttttgccatgttggtcaggctggtctcgaactcctgacctcaggtgatccgccctccttggcctctcaatgtactgggattacaggcatgagccaccacaccaggccagttttattgtcagaaagagtaagctccttaaaaaagtaaacatacaagtaagtatgcagcaaacctaaaatgttctggatgtcatcttagctatgattgcaacagtgagcatatgagtaactaataaaggaaaacaatttctcttcatcacttcctatcttacttaggattaggaatccaagattctctttccaaaatggaaagtattaaaaaccagtctcatctgaagtgaaatgtcaccttttaggactaggccacgccagtccaacatttgctgtttcattcattcagaaaataaatgtgtacatctcttgtggacaggcactgtgctaggtgtgtggaatactgtgataagcccaaacacagataagttccttcctcgaggaactattcctccagagtctggcaccttgccctgatgttgagtattttccatgtgtatattggccatatgtatactttcttttccttttttttttgagatggggtcttgctctgtcacccaggctggagtgcagtggctggatctcggctcactgcaacctccgcctcccagattccagtgattctcctgcctcagcctcccgaatagctgggattacaggcacatgccaccatgcccaccttatttttgtatttttagtagagacagagtttcaccatgttggccaggctggtcttgaactcctgaccttgtgatccccccacctcggcctcccaaagtgctgggattacaggcgtgagccaccgcacccggccatgtatactttctttagtaaagtgttcaaatcgtttgccctttaaaaaaacggatcatttggaagcttcaataggaagctattgaatgatatgagtcctttgtcagatatgtgtgttgtaaacatttcctcacagtctgtggctttccttttcattttcttttgaaaagcagatgtttttaattttgatggatataatttatacttttttcttttatggtttgtgcttttctgtcatattgaaaaatttttgcttatccccaggatatggaaatgttctcctctattttcttcttgactctttatagcttagcacttttgtttaagtctgtgatccattttgatttaatatatgtgtatgagataagataaatatcaagcttcatttttttacattaggatatctagttgttccagcactatttgttggaaaaaaagatcatttcccccattgaattactttgcctcctttgttgaaaatcagttgaccacatatgtgtggatctagttccacgtatgtgtactctgttcctttatatatatctatatacttttcttgcatatacatagcccactgtcttaatttctctagtaattcaagtaaatcagttaaagtctccaacatagttcttttaaaaattgttttcactatgctgtaatctttgcatttctatataaatttttaaatcaacttgttaatttcaaaaaaaaaaaaacaccccacacaactgaaaacaagacaaaataggaagtatgctggctaggcgtggtggctcacgcctgtaatcccagcactctgggaggccgaggtgggcggatcacgaggtcaggagtttgagaccagcctggccaacgtggtgaacccccgtctctattaaagatacaaaaaattagctggtcatggtggcgctcgcctgtgcacctgtaatcccagctacttgggaggctggggcaggagaattgcttgaacctgggaggcagaggttgcagggagccgagatcacgccattgcactccagcctgggcaacagggtgagactccgtctcaaaaaacaaaacaacaacaacaacaacaaaaatcacaaatgggtgttaatgttgtcagataccatggctatattcattgggatgattatgtgattttgtctattctattatattaatgaattactgtgattggtttttgaatgtgaaaccaacctggcattcctataataaaatccacttggttatgggatattactttttttatatgttgccgggttcaatttgcaaagattctgtctgtcaaaatatttccttctatattcatgagtggtattggtggtctctgttttccttttcttgtaatggttttggtgtcggggtagcttgctctcatcaaattatttgataagtgcttctctccttccctgttatctattttttttttttttttttttagatagcgttttgctcttgtcacccggctggagggcagtggtgcgatcttggctcactgcaacctcctgggttcaagcgattctcctgcctcagcctctcaagtagctgggattacaggcagctgccaccatgcccagctaatttttgtatttttactagagatggggtttcaccatgttggccaggctggtctcgaactcctgacctcaggtgatccacctgcctcggcctcccaaagtgctgggattacaggtgtgaaccaccacacccgacctccttctctattttctaaaatagcctgtgtggaattgatattatttctttcttaagatttgttagaattcaccaatgaagccacttgggcctaaagttttgcttatgagagggttttatattaatcaatttttaaaattgatatagtgttcttcaggtcttctgtttctcgagggagttttgatcatttgtatttttttcagaaaattgtccatttaaaggttgtcaatttattgcataaagtttttccatgatattctgttattacccttttaatgtctgtagtgatatttcctctttcatttctgatattgataatttctatcttcttttttttcttttcttgttgagtgaggttagagattcatctattttgttgttccaaaaaccaaagaaacagtttttggtttcattgattagctctattgtttgtggactttctagttcattgattttcactcttatttcctttcttctgcttcctttatatttaatttgctcttttcaagttttttttttttttttttttttgagacaatgtctcactctgtcgcccaggctggagtgcagtggggtgatcttggctcaccacaacctctgcctcccgggttcaagcaattttcctgcctcaacctcctgagtagctgggactacaggtgtgcgccaccatgcctggctaatttttgtatttttagtagagacggggtttcaccattttggccaggctagtcttgaactcctgaccttgtgatctgcccacctcggcctccctaagtgcttggattacaggggtgagccactgtgtccggcctcttttccggtttcttaaagtggaggcctagatcattgattttagcctttttttttttttttgagatggagtctcgctctgccacccaggctggagtgcagtggcaccatctcggctcactgcaacctccacctccctagttcaagcaattctcctgttgcagcttcctgagtagctgggattacaggcacataccaccatgcccggctaatttttttttatgtttagtagagatggggtttcatcatgttggccagactggtctcgaactcttgacctcaggcgtgagccaacacgcccagccgagcctttttttttttttttttttttgtattgtaagcatttaaaactttaaatttacttctcaaattttggagtgttgtatttcttaaatatttagttcaaaatattttgtaatttcccttgggagtttttcttttccctaagttcttatttatgaaagtattgtttaaattccaaatagttgggaatttctgttatctttctgtgattgattatactaatcgaattccattatagtcacatatcatacttcatatgatttcagtttttttttaattattgtgacttgttttgtggctcaattcatggtctacctagatgattgctccatgtgcactttaaaataatatatattccgctcttgttaggtaggataataatatatattccgctcttgttaggtaggataataatatatattccgctcttgttaggtaggataataatatatattccgctcttgttaggttctgttaacgtctcttggatcaagttggttgatggtattatttaagtcttctagatttctattctttttctacctgcttattatgtcaattagagaggagatttgatgtctcctgatgtgattgtgcatgtatttatttctcctttcaatagctttgtgtatttttttctttgtttggttggtttttgagatggagtctccctttgttgcccaggctggagtgcattggtgtgatcttgcctcactgcagcctccgcctcccgggttcaatcgattctcctgcctcagcctcctgagtagctgggattacaggcatgtgccaccatgccccgctaatttttgtatttttggtagagacaggatttcaccatgttgaccagggtggtctcaaactcctgacctcaagtggtctgcccacctcagccttccaaagtgttgggattacaggtgtgagccactgcgtctggctgactcatgtatattgaagctttgttactaggtacgtaaaaatttagcattattatttctccttgatgaatagactccttatcaattggaaaattttctcttttttctggtaacattccttgccctgaattctcttttacctgatattgaaaagccactttggctttcttgtggttaatacttgcttggtatattttttttccatccttttgcctttaatctatctgtgtctttatttttaaagtggatttttttgtggacagcatatagttgggccttgcatttcagtccattctgacatgtctgacttaactgaattgtttagaccattcacatttaatgtagttgtcaatagggttgagtttcattctaccattttgctgtctgttttcggtttgtcctgtctgctctactatttttctcttcatttggctttttttggcatagttgagtattttattagtattttatttgaactctactagttaacttactatgtgcacctctttttctttagtggttgatctaaggtttacaatatgcatctttttttttttttttttttttgagacggagtgttgctctgtggcccaggctggagtgcagtggcgctatctcagctgagtgcaagctccgcctcccaggttcatgccattctcctgcctcagcctcctgagtagctgggactacaggtgcctgccaccatgcctggctaattttttgtaattttagtagagacggggtttcaccatgttagccaggatggtctcgatctcctgacattctgatccacctgcctcggcctcccaaagtgctgggattacaggcgtgagccaccgcacctggcctacaatatgcatctttaagttattacagtccactttcaaataaacttatgctactcgacatataatgtgtgattcttattatatgcctctatttcctctccaatcctgtgcttattgttgttttatattttatttctacatgtatattttataagcctacaatacattaatattgttttttctttagtcattattttgaaaacaagaaaatactttttgtattttcccacatatttaacattttcagtactcttcattcctgtgtatagatccaagtttccatctgttgtcaattttctttttcatagggaagtttctttcatatttgttttaggccaggcacagcgcttgcgtctataatcccagcactttgggaggccgaggtgggtggatcactagaggtcagtagttcaagaccaccctggtcaacatgccaaaaccctgtctctactaaaaatataaaaatttggctgggtgaggtggctcacacctgtaatcccagctactcaagaggctgaggcaggagaattgcttgaacccaggagggggaggttgcagtgagccgagatcacgccactgcactccagcctgggcaacagagcaagactccgtctcaaaaaaaaaaaaaatttttgttttagtgcacatctgctgtcagtgaaacctctctgttcttgttgatctgaaaaagtctatattttacctgaaattctgaaagggattttctgtgggtatagaattctacatttacagggtttgccccttacctagcacttgaaaatgtgtcattccattgttttctggcttgcatagtttctcatgagaaatctgtgagataattcttatatttgtaaataattgccttttgtccaatgtctgaaaattgttatttcctgtatattttccagttttctggtttgtttcttttttatggtgaaatggtaattctgtaccgttactacctcatgatgagagacagaagttccatacttagagcctttttgtgttctaagaattctttgcctgtcctaagatcatgaggatatcctctgtgtttcttttaaaagctttacagttttagtgcacagattttaggtccatggcctatctcaagtaaatttttttgtatgtgcgtgagacaggaataaaggttcattttttaaaaagttatttcatcatcctttattgaaaagctttcttccctccattgaactgcattggaacttctgtctaaaattaagtggctacatatgtgtgggcctatttctgacctcattattctgttcctttcatcaccagtaccacactgtcttgattgctgtaactttatagtaagttttgaaattaggaagtcttccaactttgctcttctttgaggttatcttgtcacaaggacccaagtggcagtaatttttaaagctcctcaggtgattccaatgtgaagccaaggttaagaagtaccgtcttaggggctgaggagtcctaggctggtcccgctgggtttgtggttttgtggttttgtgttttcaacgcatttccttcaggacagtatgtttatagtctgtttgcttctgaataatttcatgtgtaagtaaccacatccaagggctttgtggagaaatggcctttaagcctaagaactcttggctccaagctgctgatcattgtgccctgtcccgtcccctctcccataggttcagtggctattgcatgagataatttgatagaaaagagttacatggggaacactgcccttagtcacctctttggtgtctaagtgcccaaactcccctgcttagacagtcactttcctgcgtccccttgtattagcttcaactgaagtagaggaaaaattgcctttattaaccctgccaggcttaaaattatgggactctctgttaaattggattggagaagaacttcacatttagtaaaactgattttccccccactcacctctcaaaccaggtgtctctaagttaagatctcctcttggccgggtgcggtggctcacacctataatcccagcgctttgggaggccgaggcgggtggatcacaacgtcaggagatcgagaccatgctggctaacatggtgaaaccccgtctctactaaaaatacaaaaaattagccgggcgtggtggcgggtgcctgtagtcccagctactcgggaggctgaggcaggagaatggcatgaacccgggaggcggagcttgcagtgagccgagatcgcactactgcactttagcctgggcaacagagcaaaactctgtctcaaaaaaaaaaaaaaattctcctctcttggtaagttagggtataagataagctgctgaaacaaagggaccccccaccccctaacacaaatatgtgttttaaaaagtttatttctctctcaggtaatgctcaagaagtgagcagtccagagctggtgaggtgattctgccatccccaacatgtgaactccagggtgactttgccatttgtcatgattttctagccacaggatggagaaagaggaagtagaaggcctgcagtttccattttaggatgttacatacttcatgttcactcatatcccattggtcagagcttggtcacagggccatgcaaggtgcaggggaggctgggaaaggtatttttggaccggatgaccatgtatcttgctgaatctcagaaaacttctattattaaaggtactaaagtctgaatggatatgggaggaaaatcattaatcttcaccatggctgtcttttgccaagagcccaataaggtttggctgtgtccccacccaaatctcatcttgaattgtagctcctataattcccacgtactgtggaagggacctggtgggagataattggatcctgggggcaggtctttcccgtgctattcttgtgatagtgaataagtctcacaagatttgatagttttgtaaaggggagtttccctgcacaagctctcttctcttgtctgctgccatgtgagatgtgcctttcaccttctgccatgattgtgaggcctccttagctacgtagaactgtgagtccattaaacctctttctcttgtaaattgcccagtctcgggtatgtctttatcagcagtatgaaaacagactaatacagagctataacaatgaataaaaaaatcaacattctgaaatttcataccattcctcccaatagcacagcatgtagagttggccacattttacctaaatcttttgccatcaccaaattactgacctggaataatttaatcttactgccttctatcctacctcttctgctcagccaattaatattttagagtctatttctcatagcaaaccacttcaaaacataaaattctgtctcaagtaggaatgcttatggctgcaagtaatgacaacctgatcaatagcttaaaaaggggtttatttttctcattacataaaaagtctagagtagtggtttctggcattggttccaatgctgcagccgaggactaagactctttctttcattctgcttgacttttcttaacatgttggctttttgacttcttctttgttattttgtgcttgcaagatgattgctatggttccagccatcacatctatttctttttttttttttttgagatggagttttgctcttgttgcccaggctggagtgcaagggcatgatctcagcttaccgcaacctccacctcctgggttcaagtgattctcctgcttcagtccccctagtagctgggattacagacatgcgccaccatgcccagctaatttttttttttttttttttttttagtagagatagggtttctccatgttggtcaggctggtcttaaactcccaacctcaggtggtccacccgccttggcctcccaaagtgctgggattacaggcgtgagccaccgtgcccggcccatcgtatctatttcaaagtgtgaatcaggagagagggtggtatctgctgcgtctgctccttacttacgtaaagaaaggaggttattccaccaagatcatgccattgcattgcagcctgggcaacagagcgagactctgtctcaaaaaaactaaactaaactaaaataataaaaatttaaaaattagaaaagaggctattccagaaatgtctccccacaggtctccttacctccttattgaccagaaatgagccatgtgctcattcctaaaccaatggaaagaagaaagggattggatgaacaccagtcaggattcatctgctagggctagaatatgagcaactttcctttagaacaagggatctttgccttctatctgaacaagtaagttctattagcaagggagaacagggaagaaggaagctaaggtatggctaatgagtgagaacaaagactaacggccacacagacaggacactgtgagtgtgagtgtgggctgtgtgattgtgtaagcacgcaggaagtatggaaggatgtatacttggttgtcagcacatgccacatcacagtgggaaagggggcatggatacaggtgaaggtgggaggggaagcaaacaaaactgaaaagaaaaagtggcctaaaaatatggcgatcacgtttatgcatttatgtccaattgtgtacttatgtgaatatctaaataaatttgaaaaatgtttaaaataatcctgatcccatcctaaatacaggtagttttttgcattatgtcagcaccctggctgagcccctgcattcaagcaaaaaaactaaatcaatgaatgatgagtacatgaataaatgaataagtccatagcagccacagtagatatcccattgtccacggattaagatcgttcatgccaccagctagagggacagccactctgcactcactccctagcatagttatctagtgcaattctaacatcttgaatcttcttctttttgttttaaagtcccagcatatgaaaagtagaaaaatagttaaggaggctactagagatagggaaactgacagcaactagaggtaacagctgacatgttgacagtgaagaagacagccatctataggaagcagacacaagaacacacaaagaacatacacaagaacacacacgatctatagacagcaatctataggaagcagacgaaagaacacacaaagacaacactgtcaggccattttgtttaggaggaacttgttccaggcacctccataacccccggtggcactggttttacagcaagtcacaacaaggctgctatacacatcaggccccagtgaatgaggaatgggagagtatgcgccacattctctgtttaagaaggcaaggcggtgtgtgatagaacagaggacaagggctatgcccagttcatccttgtgactttcaaggcacaactttcagctctcagctggatgccacatctggactccgcagccttctcaagctcagcacattttaaactcttcctgcgtcatttccaactgaggtgccaagttgtcattggctaccaaagctataggcaaatccatgtattgagattttcaagggcaatgtctgaaaaagtgtttctcagcaattcctcatccttccctacttggagataataaacatgatcagggtgcagagagagagaatttgggataaggagattggtagtgagagttttgggggaaaggagttgaccgtttcaggcttctaacccccctctatttggggtgagaggccagcaagcttttgtcctgtgagccaaatctggtcatagcctatttgcacaaataaattttaattggcacactgccacgataatttgtttgagtattgtctctggctgttttctttttcttttctttcctttttttttttttttttttttgagacagggtctcgctctgtcacccacactggagtgcagtggcttgatctcagctcactgcaacctccaccttccaggctcaggtgattctcgtgcctcagcctctggaatagctgggataacagccatgtgccaccatgcttggctaatttttgtatttttagtagagacagggtttcgccatgttggccaggctggtcccaagtgattcgccctccttgtcctcctgaagtgctggcattactgccatgagccaccacgcctggcctctcgctgttttcaagtatcagtgggaagcttgtgacagaggctgaagcccataaagcctaaaatatttgctgcctggctctttccagaaaaagtttgccatccctgattgtaacctcatgcctcatgaggaagaccacaggggtccccaggagagttttaagatatgtccctgctaggtgggcaacataaaggatgagtacctagactgtatctaaggcggccatgggctaggctctgactctcccaagggggagagaagggtgaagacctgctttggtggcataccccgtgctatgacactgggataggaggtgacgctgagtgtttcccaaggaccacactcaggattgagtgggagagagagcagccacctggagacctcagcagatagaggctggagtggatcaactcctgcccagggattaaagacatcacaagagaccacccagaataggtgcattctttgcagtcaaaggaagtgggggagaaaaggttgcagaaaagaatctctaggctgggcacggtggctcacgcctgtaatcccagcactttggggggctgaggcgggtggatcacctgaggtcaggagttcgagaccagcctgaccaacatggtgaaacccggtctctaccaaaaataccagaattagccaggcgtggtggcacgtgcctgtaatcccagctacttgggaggctgaggcaggaggatcactcaaacgcgggaggcagaggttgcagtgagcaaagattgcaccattgcactccagcctgggcaacagaatgaaactgtgtctcaaaaaaaaaaaaagaagaagaagaagaagaaaaaagaaatctctaaagagctcaccaaagtgagagagagcctcctctaaccatctgcctgccctgagacagcatgaagccagccgccaagttggagctgggctagacccttccttctccctacccactgcttctgatgcacctggtgggactgcacccacaactggcaagtttgggggacacatgagtaagggaagaggaggaccagaaggccgtgttaccttccccgctgcagtcttccagccaaacagtgagggagatttaacactgtcatgtttgggattctgacattcttctcttttttgagagagagagacagggtcttactctgttgcccaggctgtagtgcagtggcctgatactagcagctcactacagcgtcaatctcctgggctcaagcgatgctgcctcctcagcctcccaagtagctaggactgcaggcatgcgccaccacacccagctaattttttcttttcttttcttttcgttttttttttttttttttgagacaaagtctcactctgtcgcccagtctggagtgcagtggcgcgatcttggctcactgcaacctctgcttcccgggttcaagcgattcttctgcctcatcctcccgagagctgggactacaggcgcgtgccaccaagcctggctaatttttgtatttttagtagagatgggtttccccatattggtcaggctggtcttgaactcctgacctcgtgatctgccctcctcagcctcccaaagtgccgggattacaggcatgagccaccgtgcccggccaattttttctttttttgtagagacagggtctttctgtgttgtccaggcttggtctcaaactcctggcctcaagagatcctccagcctcagtctcctgaagtgatgggattataggcatgaaccaccacacccaacccattctaacattctaactactaaattgaaactgtttgtgacctaatatgactcatctgttccaaggaatgagtggaaaaggtttgggacctgccagagtttcccagctcatgagaaggccacctccactagggagagcttagggggatgataggaacacactgaagtaaggtttggtttctggcatgactcatgcttgttcaacatgctggatccaataacatatagaatgagtgtccctaatccccaaatccaaaatatgaaatgctccaaaatgtactagtttttgagaactgatgtgacatcacaagtgcaaaatttctcatttgacctcatgtgaaggggtggcaggcaaaacacagtcgaaactctgtttcatgcacaaaattgtttaaaatattgtataaaatttccttcaggctgcgtgcataaggtgtatatgaaacataaatggccaggggtggtggctcacgcctataatcccagcactttaggaggccgaggtgggtgggtcacctgaggtcaggagtttgagaccagcctggccaacatggcaaaactccgtctctactaaaaatgcaaaaattcgccaggcgtggtggcacatgcctgtaatcccagctacttgagaggctgaggcacaagaatcgcttgaacccaggatggggaggttgtagtgagccgagattgcgccactgcactccagagtgcactgcaacagagtgagactctgtctcaaaaaaaaaaaaaaaagcaaacaaacaaacaaaaaaccgtaaatgaaacaaacaaaaaaccgtaaatgaattttgtgtttagacttgagtttcaaccccaaggtatgtatgtgcaaatattccaaaaagtgaaaacatctgaaatctgagacatttctggtcccaggtatttcacacaagagatattcaacctgtattattaagcacatgctggacatcatgctaagcccttttcatgcattacacatgaaacctcccaaccagcctttactgttaagccaatttcacagaagaggaaccgaagcaaaggaaagataggctatggtctagaggaagcttgtccaacgcacagcctgtaggctgcatgtggcccaggacagctttgaatgcagcccaacacaaatttgcaaactttcttaaaacattatgagttttttgtttgttttttgttcctgttttagctcattagctatcattagtgttagcgtgttttatgtgtggcccaagacattcttcttcccatgtagcccaggggaaccaaaagattggacaaccttggtctagagcctcattattaagtggtggagatgagattcgaacccaggcaacccaggaccagcctgagttctcaatcgctatgtcatgctgactggaagcacagcaacccaagccttggttctcaaaaggtttgttattggctgagaggtcttgacttcccctagaatcccagggttgctgactttgtttctcccgtcagagcctgccacagactccttattggatccgagttggccagagacccttcagacctcattgaatcagctgggtcacaagtgccaagttgctcgcagtgcagcctggaccggctctggaacttctcattgtcaaagctaagagtcaattgagtcacccactgagtcagatggcatactcaaatgtattgcacaagtctaaaatcctgtgtaggcccacaaacattgcacctgagtcctagtgatagggcataccaggcacagcaacttgcttttcattttggagaaagagccctagtcccccagatcattgaacaccttcccccacctctgctccaaatccactgtcccaaatcttctgtagctttgggagatttctcttctacccattgttgtgaatttttttacccaggcatccttggtgtctgctacttcagctccctagattctatcaacttgatgtcccttgagatggttcaggttcccacagaccaaacttaagcccagcaccagagaggtaacaatactgaggtaagtaaggaaaagatgtactattgtccttgccaggtacaacaaacaaatgaacgaacaaatgaatgaacaactaacctgcttctgcttctagtgtgtgtcataatagagaaatatttggcaaatccacggatgcataccaagtgccagagtctctgtatatctgttttggtcaaatgaagccacctggaacagcacatgtaactgattaagtttatgataatgcactgtcattccccaagccccatctggttttcttcactagtcaaactagagagttaaaagggaatgtgatagcaatcatcacctctggatctttcatgtctattaatctctgaaattctccgagggatatggtatcacttgtgatgtgccattttgtacatgaagagccctttgagtttacacttggccatttgagccaatgtggggatttgctattggtacatgtatatgttccacttatacccctatgagccagggaaataaagacagatttggggactctttgggcctagtgacaaacttaaaacttagtttcttacctaactcaccataaatcccttctctgactggtgggcaacagtggtattccaggtccataggaattagcattagtaatggatgcagttttcaataatccttcaaagatctaggttttctgtttctctagtacacatttgccttgattaatggtggcagtgattttgggggcagatgaggatgaagatttacagcagagatgtccaatcttttgacttccttgggtcacgttggaagaagaagaattgtcttgggccatgcataaaatacacttaacactaacaatagctgatgagctaaaaaaaaaaaaaaacatatatatatatatatatatcataatgttttaagaaagtttaagaatttgtgttgggcagcattcaaggccaacctgggccacatggggcccactggtctcaggttgcaaaggcttaatttagagtatgtatctgtgatcttattgtaacattcttcatcaagaatacctggtctgttttcattcaagagcctctgggtctgtgatacaattcaggtcttgaattgagaatgtctatcccagaggctcgatccatgcctcttgttaatcaggtctgagtgggctccttaatgctcttggtcctagaaattccttggtcaattagcatggtgaaagacccctgctaggcagagcagttggattctattctggccctacttccttgtgcactagggggtggtttggggataggctggggaaataaatactgatttgtatttgctatctggaggtggtttggggatggtggtggtttctagttagccaagtgtaggtcacttatccatagccttgcaacagaagagcctggggagttgtgaaacagggattttcagtttcaactgccggaaatagtctgcctttcagcagaatttataatctggggaaataaattcagattttcattgtaaacataggaagaaggttcagaggttgctcagccaaaaatgatgacaaatgcttttccacaattcatctcaccttcttctgtcatttaacaactgtaaggtttagaagattaatctcagcttcaaacgtagttcatgttttattcaaaccaagttgaataatgcaattctctttgccagtgacttattcagaaaatcagacctaagctagttaggcacatggcatgcctctgacctcgggggttggttcaggagctcaggagtaggcatctgacacactttggtctaatgagatgcaagatgacatgttctgggagattctggggaaaagtttctcatgttccagagagccagagaaagacaatagtatcttctgtacttgatccctgcaggcatcttgatagcaacatggagctcctgcaggacagcgggcagagctaagagaatcctagaggaactgagctggatctgctggggtttatttatgtattattttattttatttttttagagacagggtctcactctgcccaggctggagtgtagtggagcaatcgtagctcactgcagccccaaactcctgggctcaagcgaccctctggcctcagtcctttccgcctcagcctccggaggaaatgagagtaatggcgcatgccatcacactctgctaatttttttatttttaaattttttgtagaggtaagttctcgctttactgcccaggttggtctcaaactcctaagctatcctcctgccttggcttcccaaagtgaggggatttacaggcatgagccaccccacccagactggatcttctggtttaaaccaaccctgaagccttccttcaagactcactagatttacttctacacatttcctcattgtttaagccagtttgagttggattttctggtatttgtgatcgaaagcatcctaatttgattccatataaaatcgtctgtgtttacagctcctagtggcatcttccagaactggtattcctttataataatcactactgtcctgacagatgggagtggctggaatctggactaaaatggcaatataacaaatgtaaattttgatatgaaaggaaataaatatcgattaaatgaaataacgattaaaatgtatagtttgtataataaaagaaataagttttagttacccaaatttttctttttctttttctttttttgagatagagtcttactctgtcacccaggctggagtgcagtggctcgatcttggctcactacaacctcccacctcctgggttcaagagattctcctgcctcagcctcctgagtagctgggattacaagcgcccgccatcacgcccggcaaatttttgtatttttagtagagatggggtttcaccatgttgaccagcctggtctcgaactcctgacctcaggtaatctgcccaccttggcatcccaaagtgctgggattacaggcatgaaccactgcttccggcccccaaattttttaacatacggaccattcaattccatataatacaaataaatgaggcaccattaagtgtttagaaaatacttatacaagtaaaattataagcctattttcgtctctctccacccttcccctcccattgagctgcttcgttattctgaggcattgcaagtcaggggagctggtttgtgatatgtccttaggcaggtgaatctgcttttctcaatcttaggcttctagtctgcaaaacaatttctgttagtatcagattagttcatatgtgtgaaaaatcatcataaaggccagtgcagagaagaggcaggtattattctgggttctggagggatgagatagtcacactgatcattaatgaattttagttctcatgtacatactttgtttcctgctttggttgctgattttagtatttgaaaaaaataacaaggctgggcacagtggcccatgcttgtaatcccagcactttgggaggccgaggtgggtggatcacttgaggtcaggagtttgagaccagcctggccaacatggtgaaacccctgtctctactaaaaatacaaaaattagctgggcatgatggcgggtgtctgtaatcctagctactcaggagggtgaggtgggagaattgcttggagctgggaggtggaagttgcagtgagctgagattgccccactgcgttccagcctcggcaacagggcaaaactatgtctcaaaaaacaaaacaacagcaacaaaaaacaaatcaattggtgtatatcttcatctcccatggcatcataattagtattccacatatatttgatagacaactgagtattaataactaacagtttatgagagtgagcagaagtaacagagtactttcaaatacgtaatcacatttgagatatgcaggaactctgtagttgggaaagagggcagtgttatgatcacaactttgtgtctcaatttgtatggctagttcgtgttagaagcagaattttaatcctgtcttctgataatatttctatgagagtctaatttcacatttgtgtttttccctgactactagctttgtgaccttggacaagttacttagcctcttcatgccttggttttcttatctgtaaaatggggataataatagcatagggttttttgagaattaaatgagcaaagagtttggactagaactttgcacttagtaagcactatgaaagtgtttttaaataatatataaatatttgagaattaaatgagcagtgtttggactagaactttgcacttagtaagcaccacgaaagtgtttttaaataatatataaatatttttttcttcccctgctactacatcatcaccatggttaattcccatcttcaagtatttctcctcaaatacttgtgtcatcttgatctagttggtttttgcctactatgcatgaaataatgttttacattacagtgtgttgttacttttcacacagggatttagatcagggttggcagaattatggccaaatccagcccaccatctgctttcataaataaagttttattggaacccagccactgccatcatttacatattttcatatgctatgattggcagagttgtgtagttacagcaaagaacgtatggcctgcaaagcctaaaatattatctagctcttaacacaaatagtttgccaacccctgtttaagagatatatatcttttttttttttttttttgagatggagttttgctttcgttgcccaggctggagtgcggtggtgcgatcttggctcactgcaacctccgcctcctgggttcaaggaattctcctgcctcagcctctcaagtagctgggactacaggcgcacaccaccatgcccagctaattttttgtatttttagtagagacggggtttcaccatactggccaggctggtctcaaactcctgaccttgtgatctgcccaacttggcctcccaaagtgccgagattataggtgtgagtcaccgcaccaagccccaaatatatatatttattttagacagagtctcactctgtcacccaggctggagtgcagtggcacaatcctggctcactgcaacctctgcctcccgggttcaagtgatcctcctgcctcagcctcctgagtagctgggactacaggtgtacaccatcatgcctggctaatttttgtatttttagtagagacggggcttcaccatgtgggccaggctggtctccaactcctgacctcaagtgatccgcctgcctcagcctcccagagtgctgggattatggacgtgagccaccgtactcagccctaagatacatattttttagagaaatacttggagttttaaggtcttcaagagaaaagaaattgtacacttaaaaaaattcaaagacaataaatatttcctttcttgttcctactgaataacaaaggacaaatatagatgattccctgcaaaactattcacttaccttacctacatcacagacaaggggcaattaatattatcattattaatctgttactattataacaattgcaaattgctcttgcccagccccatgcctgccaagaagcttatggatttgcctcttttaaagaggctcatttccctcctcaaacatgacttacaattagagactgtcccttgcgatcaaaggagtgatttatttccccctgagatcagatcaaagccagttttggagcgctaggtcttgtgctgtcgtccccccaccagcccccatcacctcacagatacttcctagaggagagcagtttcttctaagtttgatcctgggttataccaggcagatttctacattgtcatgactgcaagtcaccccccttaatcttggatatttgtctcctaagttgatgagaaattccaggagaagaattgggatggaccagacccaatccattatgatttcttccctgggaaaacatttcagagcacatgacaagccccgctgcgtaaacaggactagatcaaatgcctggcatgggactgtatcattgtatatttctactgttctgatgttttatgttttaaagtgatctatgacacagtggctacctcagttctgtcccatctagttcttgcagtggaattgctttttctcagggcctctgcctatacagatcactttgagcaatttgtctttaaagcttcttgaaatgatcctaatattctcctgtaattctcactgctctaagaatctgtctcctctagacataattcctatcattttataatgcaatgatattgcttaataaatccttaatgtatgttactattcagattgacagattgtatacttattatgtatgacattttcattgacttcttttgcgaagtgacattattgccatcccagcctgggaaagatttaatacctgattcttcctccgtccatttatcagagtcattcagaactccctcctttttccctcccgcctcaaagtataaattaaaatatttttctttcaaacatatttccttggatatttttctctagtaatcactttgttaaagagatattactacctaaaggacagtcacgttcccagtccctgtctgcatcctgatttatcgagatagcttataggcattttttttttttttagacaaagtttcactcttgttgcccaggctggagtgcaatggcacgatattggctcaccgcaacctccgcctcctgggttcaagcgattctcctgcctcagcctcccgaatagctgggactacaggcatgcgccaccatgcctggctaattttgtatgtttagtagaggcggggtttctccatgttggtcaggctggtctcgaactcccgacctcaggtgatccgctcgccttggcctcccaaagtgttgggattacaggtgtgagccaccatgcctggccagtttataggcttttaaaaccaaatttccctcccttcctcttccctcccctcccttcccctcctctctcctctcctctccttctcctgcctcagcctcccgagtagctgggattataagctcctctcctctcctccttccttcctttccttctttctttttctttctttctttttttacttcagacatgttttattataatcttatacagcctacttgtatttatttgggttcagttataacatagcataataagaataaaatacctgggtgatgaaataataggtacaaaaaaatccctgtgacatgtgtttacttatgtaactaaccttcacatgtatcccaaacctaaaataaaagttaaggccgggcgaggtggctcacacctgtaatcccagcactttgggaggccgaggcgggcaggataacttgaggtcgggagttcatgaccaacctggtcaacatggtgaaagcctgtctctactaaaaatatggaaaaaattagctaggcatggtagtgcacacctgtaatcccggctactcaggaggctgaggcaggaaatattgctagaacccaggaggcggaggctgcagtgagccgagatggcgccactgcactccagcttgagtgacagagagagactccatctcaaaaacaaacaaacaaacaaataaataaataaaataaaagtaaaaaaccaaaaaacaaagcactggtcctctgaaataaaccaggcaaacaccattcaataaatacacttgattgattttgtatagaagggctaagtttacaactaaacttatataaaaagtttagcatgaatcagtacatcattacaccttttgaggcagaaatatacatctttgccactatacaagaaaactctaaagagtttacaaggtttcactcaatagatatatattcatgtataaatatataaacagcattcagcaggcttgtgtcgaaaaggtaatttctgaccaaaagacttcatttaagtgactgaatcctggatccttctgttattcatgctccgctcttgaaaaaaggcaaagtctgctcacgttgtgcaattccttgtgattttaacatttttgttttcattccccatggtgggaatagtgtataaagaaaaccttccaactgcagaaagggcatttaaatgtctctttcataaataacaaatatcacagtccaagtcagagaataccctgcaaagatgatcgttcttagttttccttccatattttctctcccttccttccttccttctttccttccttccttcctctctcccttccttccttcctcccttcctccctccctccatctctccctccctctctccctccctctctccctctttctctttctccctccctttctccctttctctctctctctctttctctctttctttctttccttttgagatgagtctcgctctgtcaccaaggctggagtgcagtggtggaatctcggcttactgcaacctccgcctcccaggttcaagtgattctcctgcctcagcctccccaggagctgggactacaggtgtgcaccaccacgcctggctaatttttgtgtttttagtagagacagggtttcaccatgttggccaggctggtctcgaactcctgacctcaagtgatccacccacctcggcctcccaaagtgctgggattacaggcatgagcctccatgcctggccactaaaccaaacttctaaggtattatccaaatatattgctgatgacaaaggaccattgtttgattaattccttacaaatattatttataatgtctctattagaaacattataagtggtttctaagttgcttctatttaatgtttatggaaatttaaaaccttaaactctatttttaaagagacgatttttaacagccttgaaagcatcttcaattttgatgacaaattgttaaacttgaaatattaatttgtgtcttaattcaaaggcagtgggatgcagatcagaatggtgcagcgttcctgccctcatgaggtttgcaatttcaggttagagtccgacacattttaaaaaatatcgcaatgtgggaaatgctaagggagctactgttctgggtggattctacaggttttactggagcaagtatgatggcatcatctaggagggcttcctggaagaggtaaactaggtcttaagggaagcatcagatgtcactggcttgggaaagatattccagaaggaaggaacaggttgtacaaagtaaggtaattttgtttggggaagctccagcaggtccacatgaggacacagttgagattgtctaactctatgctcataactgtaggtgcttgggaaaagctgaactaagccagtgttaacagacgttgtctggacaatgcagtgggtctagaagcaggttagaaggactagaagagattaaaaaaaacaaaactctgatgtaagaaatgaatatagctgcagataaaagtagtttggcgctatctgtatggttcccatctaggtttattttatttcatttatttatttgagatggagtcttgctctgtcgcccatgctggagggtagtagcgcgatctcggctcactgcaacctccacctcccaggttcaagcaattctcctgcttcagcctcctgagtagctgagattacaggcatgcaccaccatgcctggctaatttttttttgtatttttagtagagatggggtttcaccatgttggccaagctggtctagaactcctgacctcaggtgatccacctgcctcagcctcccaaagtgctgggatgacaggtgtgagccacagcacccagcctcccaacaaggcttctaacagggcaatcagaattttctttaattttcctctatggttctattgggtaagatccttattgagtgtacaggtctgcagatagaaagaaacaagccaaggagaacactgcttcctctgtttctgtgggttatgtctaattttaggaaacagcgcaacaaataataaaaaatggatgtttctaagtagatttgtgtgtgtgtgtgtgtatgtgtgtgtgtgtgtgcgtcctttaatgcttttacccccatcctggcctcatgcaatgtcaaaaaaaagtaagtgagcaaattgacactttcttcttttagtgattattattatttgagatagggtctcactttgtcacccaggctggagtgcaatggtgtgatctcagctcactgcagcctcaacttcctgggctcaagtgaccctcccatctcagcctcccaaatagatgggactacaggtgtgcaccaccacgcctggataattttttgtatttttagtagaaacagggttttgccatgtcgcccaggctggcagtgatattatttttatctccaacatgcacctatggcaggttggcctctgctctctcatccccagaaccaagttatttgcttaaactctctctaatgcagtggctctgaggagagtccctggagccaaggcgcctggatttgaatcctggcactactacttaactattcactgggatgagttattcaacatggctacatctcagctttctcatctgtaaaatgggggtattaataacagtaccaacttcataagcatcttgtgaggattgaatgaattgaacatatataggtgcttataagagtacctgtcacgtgctagtacagcttgagtttggccagtctcgtctctcaaacagcatctagggacatatgcccagagccgcaagagcactgatcttcagtactctccctcttccttcttttccccactctcttaatcaccattcagtgtgtacgcccctatcctcaccccagttagctcctggggctcacacttaatttgttcagaggagaagtggcctgggcagtgtcagtccctggtagtaacgagatgtgttacgtgttgatgcctggaaaagagggaataagaagaaatcctaggtctgcagccataaaaaaggatgagttcatgtcctttgtagggacatggatgaagctggaaaccatcattctgagcaaactatcgcaaagacagaaaaccaaacaccgcatgttctcactcataggtgggaattgaacaatgagaacacatggacacaggaaggggagcatcacacaccggggcctgttgtggggttgggggagtggggagggacagcattaggagaagtacctaatgtaaatgatgagttgatgggtgcagcacaccaacatggcacatatatacatatgtaacaaacctgcacattgtgcacatgtaccctaggacttaaagtattaaaaaaaaaaaaaagaaatcctaggtctatttctccatcactgcttaccagctttaggaaaatctaaaaagcctacagccctcagtttcctcatccttaaagctgggatgataataattatcctcatcccccttggtcctcgtgaaggtcacaggagaatactgcttatggaaatcttttgtaaactgtaaagtgcaaatagatatataggactgttttcattcacccaaacacttgtcaatgaatagcattagcttttcttggtcttaatatattattgagtacccgccatagaatgtcaaatagaaatcttgtcttagtcctgacttttatgggagggatttgtaatatctgacttgtaaaatcatgcttgcttagattgctaacatgcttgattaggtttaagacatttcttttcctgggttgctatcatgaatggatgttgtattttagcaaatgcctctaaaagatctgttaataccaccaatggtttttctacatatatatatatatttgagacggagtcttgctctgtcacccaggttggagtgcagcagcacgatctcagctcactgaaatcgccatctcccaagttcaagcgattctcctgccttagcctccccagtagctgagagtataggtgtgcaccaccaggcctggctaatttttgtattattagcagaggcagggtttcaccatgttggccaggctggtcttgaactcatgacctcaagtgatccacccgctttggccttccaaagtgctgggattataggtgtgagccgccatgcccagcctctaccttgaaatttttaatagactgttaatatggaaacatcttaacattcccagaatgatcctttgtacctttaatacacagctggatatgaaattttgtatctttgtttttactgatatgtaaatatatatatttgtatacacacatatgtacaccatatatattgtgtgtatgtatgtgtgtgtgtgtgtgctgattgatagatacagatagatataaggttgatatggtttggttgtgtccccacccaaatcttatcttgaactgtagttcccataatccccatgtgtggtgggagggacctggtggggcagtttcgtccatgctgttctcatgatattgagtgagttctcatgagatttgacagttttataaggagcttttcccctcttcattctggacttcttgctgctaccatgtgaagaaggacatgtttgtgtccccttctgccataattgtaagtttcctgaggccttcccagccctgtggaactgtgagtcaattaaacttgttttctttataaattacccaggcttggatatgtccttatagcagcatgagaatggactaatacaataagttggtaccaggtagtgggtgctgctgtaaagatacctgaaaacgtggaagcaactttggaagtgggtaacaggcagaggttggaacagtttggagggctcagaagaagataggaaaatgtgggaaagtttggaacttcttagagacttgttgaatggctttgaccaaaaagctgatagtgatatggacaataaagcccaggctgaggtggcctcaaatggatatgaagaacttgttgggaactggaataaaggtcactcttcctatgcaaagagactggtggcattttgcttctgccttagagatttgtggaactttgaacttgagagagatgatttagggtatctggtagaagaaatttctaaggggcaaagtgttcaagagaaagcagagcataaaagtttgaaaaatttgcaacctgacaatgcaatagaaaagaaaatcccattttctggggagagattcaagccagctgcagaaatttgcataagtaaggaggagctgaatgttaatcaccaagacaacggggaacatgtctccggggcatgtcagagaccttcatggcatcccggagacctgagaggaaaaaatggttttgtgggccaggtccagggcccccgtgctgtgtgcagccaagtgacttggtgccctgtgtcctaaccactccagccgtggctaaaaggggccaaggtacagctcgggacatggcttcagggggtgcaagccctggtccttggcagcttccatgtggtattgagcctgggggtgcacataagtcaataattgaggtttgggaacctccacctagatttcagaggatgtatggaaatgcctggatgtccaggcagaagtttgctgcagagccagggccctcatggagaacctctgcttggggagtgcagaagggaaatgtggggttggagcctcacaccgagtctccgctggggcactgcctagtgtagctgtgagaagagggccaccaacctccaggcaccagaatggtatatccaccaacagcttgcatggtgcacctggaaaaggcgcaggcactcaacgccagctgtgaaagcagactggagggggattttaccctgaaaagccacaagagcagactgcccaagggtgtaggaacccacctcttgcatcagcatgacctggatgtgagacatggagtcaaaggatatcattttggaactttaaggtttaatgactgtcctattggactttggacttgcatggggcctgtacctcctttgtttcggccaatttctcccatttggaatgggtgtatttacccaatgcctgtagccccattgtatctaggaagtaactaacttgtttttgattttacaggctcttaggccttgtctcagatgagactttggacttggacttttgagttaatgctggaatgacttaagactttaggggactgttggaagggaatgattgtgtttttgaaatgtgaggacatgagatttgggaggggccagaggtggaattatatgattttgctgtgtgtccccactcatatctcatcttaaactgtagttcccataattctcacatgtggtgagagggactcggtgggaaaattgcatcatgggggcggttacctccatgctcttctcatgacagtgagttctcacgagatctgatggttgtataaggggctttccccactccttttctcagcacttcttcttcctgccaccatatgaagaaggatgtgtttgcttccccttccattttgattgtaagtttcctgaggcctccccagccctgcaggtatgtccttatagcaggatgagaatggactaatacaaagatatcagtgtttctttcttttcagagacagaatctcactcttatcagcaaggctggagtgcagtggcatgatggcataatcatagctcactgcaaccttgaattcctaagctcaaatcatcctcccacctcagcctcctgagtagctaggactacaggcatgcaacacacattcctggctatttgttttttaatttttgtagagatagggcctcgctttgttgcccaggctggtctcaaactcctagcctcaaatgatcctcctgcttcggcctcctaaagcgctgggattacagatgtgagccaccatgcctggccaggtatcaatggtatactgaacctctaaaatgagaaaatgtgttaggtaagcttcccatgttttcctaggatcagaggcagtttatatagaattatctcttccttaaagctttgtcagaatctacctgaaaagccctctggactcagtgtctgttttagggatagatctttgagtatctctttaagttccttgatagtaatgattctatttaacattcctaattttccttgaatgaatctttgtaattaatatttttctaggatattagtctcttcatccagtacttttcaaaatgcttgccatgaagataaacattcttagtttttgacttgtgattttttcttgaaagataagccaaagttttgcctttctattacttctctcaaaaaacaagttaatttttattttttaacttttattttaagttcaggggtacatatgcaggtttgttatataggtaaacttgtgtcatgggggtttgttgtacagattatttcatcacccaggtattaagcctagtacctattagttatttttcctgatcctcatctccagcccctgataggaccccgtgtgtattgttcccctctatgtgtccatgtgttctcatcatttagctctcacttaaaaacgaaaacatgcggttttggttttctgtttctgtgttagtttgctaaggatattggcctctagctccatccatgttcctgcaaaaaatatgatctcattctttttttatggctgcatagtattccatgtgtatatgtaccacattttctttttccagtgtatcattgatgggcatttaggttgataccgtgcctttgctattgtgaatagtgctgcaatgaacatacacatgcatgtgtctttataatagaacaatttatattcctttgggcatatacccagtaatgggattgctgggtcaattggtatttctgcttttaggtctttgagaaatcgccacactgttttccacaatggttgaactaatttacactcccaccaacagtgtataagtgtttccttttctctgcaaccttgccagcatctgaaaaaccagtcaccacatgctatcacctctttattttctatttttattaatttctactcttatctttcttaattcattccttcaactttcttcaggtttattttgtctctctccatcccctgccaagcttcttgagttgaaatcttggttgattcatttattttcaacatttcttattttctgtcacatgcacataaggctatgtattttccctgtgagtgctgtcttagcgtgtcccaagggccttgatatccatggacagctcttactgtgattcagttctaaatggcttgtaatttctgtgcttatttcctgtcaaacctaagacttatttagtggaatgttttaaaatatccaagaggatagatttttgtttgttatccatcttttattattttctaattttattccattatagttcatgaatgtatgctgtcacagttttactattggggatttgttgtgattttctttgtggtttaatacattcagagaatgtctcatgagagttggaaaaaaatgtgtaatgtctgttggataaaaacttgtttctctccatatgcctatgaagttataaatgttagttttgtcagccaggacttcttaagacatattcatttgggtagtagttgatcagcctgtttttgagaaatgtatttaaagccacccatgatggggacttaccagtgattccttgcatttctatcagggcttgtcttacttacagattttgaggccaaggttgtaggtacataaatgtttatgattcatatttttgtggattataatgttataattatgatatattcttttaatgcttttcattttgaattttattttgtgtgagatgactactattaatatatacctggcatgcctttttcttttattttctttttttgtcatccaggctggagtgcagtgtcatccaggctggagtgcagcctgtctgtcatccaggctggagtgcagtggcacaatcttggttaactgcaacctccctgcctcccaggcccaagtggtccttccacctcagcctcctgagtagctgcgaccacaggcctgcaccagcatgcctgactgatttttgtatttttgtatttatttatttattttttgaaacagagctttgctcttgttgcccaggctggagtgcaatggcatgatcttggctcactgcaacctctgcctcctgggttcaagcgattctcctacctcagcctcccaagtagctgagattacaggcatgcaccaccacacccagctaattttgtatttttagtagtgacagggtttctccacgttggtcaagctggtctcgaactccctacctcaggtgatccgcccgccccggccttccaaagtgctgggattacaggcgtgagctaccgtgtctggcctaatttttgtgttttttttttttttttttttgagacggagtctcacactgtcacctgggctggagtgcaatggtgcgatctcagctcattgcaacctccgtctcccaggttcaagcgattgtcctgcctcagcctcccgagtagctgagattacataatttttgtatttttaatagagatggggtttcgccgtgttggtcaggctggtctcgaacccttgacctcaggtcatccacctgcctcagcctcccaaagttctgggattataggtgtgagccactgcgcccggcctagcatgcctttttcgatgtcttttccatctttcctgtgttcttttcattaggtgttaggattgctgatatgtttggccttctttctggctgtggcagaaaagtcacaatggtctttcccaagtatatgccatttggctaccaaaaatgcatcctccctttcctagcatggaaagtgacagcccagtcaagggctattttctcaaccctcttcatgcccagttatggtcatgtgattagttctcagcaatgaaatgtgggcagcagtgatgggaatcactaaggacttaatgtttttctctgcttttattgaatgcgcacttaattggtgatgatttgcagagaagtggagaaagcagggaactaaggagtttctatttgtttactgattctaagccctgaaaatgccaggtgatcgggggtgatcagacgtgtctgaatcacgttggtggtgccagtgacttgcttgatgtttgccttccccatcacttcagctccctgaggcctgggactgtgcctaccaagtgctacatggtctccctaaagcttgggttatagtacactctttattaacatttattgtgtgaataaatgaaatgctttacatttactggtgacctcatcaactaattctttttttttttttttttttgagacggagtctcgctctgtcacctaggctggagtatagtggcgcacgtcggctcactgcaagctccgcctcccaggttcacgccattctcctgcctcagcctccgaagtagctgggactacaggcgcccgccaccacgcccagctaattttttgtatttttagtagagacggggtttcaccatgttagccaggatggtctcgatctcctgacctcatgatctgcctgcctcggcctcacaaagtgctgggattacaggcgtgaaccaccgcgcctggccttcatcaactaattcttttggtaaatgaatttctgcttaaaccaggccaagacctttctttataagaagccaggccagtgaatcagggagtgagatcagaggaaaggaagtctcccttttgtgtctttaagtcatgtattgtgccgtgactagctggaaaagctgcaaaatagtataatagaagctgtatatatcagcaatagcaaggattacttgtctgagaacctggtttgtgccaggcactgaccttgatgcttttcatacattgcttcattgaatactcataaaagctaccacacaggtgtgattctccctattttacagatgcatcagctgaggctctgtgcggtaaataagttgttcaatgacagagaccaagtaagtggccaagtcaggactcatatccgtcttcctgacttcgagcttgaattcccttctaccataccttataaaaagaattcagcagcctgaggttcaaggttcagctgcatgatattgagaattcatttagtttctctgagccgccatctccttatttgtggaatggagataatgatgacactgattgatgctcagctcctcacagagttattgtaaagacaagtgagagaatgactatgtgttttgcaagtgattaaattcacaaacacaagtcactttacttacagtatactggagacacttacattaggcttttaaacatttatatatatatgtatatatattttttgatacagggtctcactttgtcacccaggctggactgcagtggtgcaatcttggctcactgcagcctagacctccaggactcaagaggtcagatcctcccaactcagcctcctgagtagctgggactacaggtgtgtgccaccatgcctggctaattttttttgtatttttttgtagagatggggtctcgccatgttactcaggctagtcttgaactcctaagctcaagtgatccatccaccacggcctcgcaaagtgctaggattatacgtgtgagccaccgctcctggccagactttttttttttatttaaaaaactttatttttaaactttaatttttgagacagggtctcactctgtcacccatgctgggttgcagtggtgtgatcatggcttactgcaaccttgactttttgggctcaaggggtcctcctgccttagcctcccaagtagcttgggctacaggcatgtgccaccacgcctagctaattaaaaaaaattttttttgtagagacggtgtcttgccatgttgcctaggctggtctcgaacttctgggctcaagctcccaccttggactcccagtgttggaattacaggtgtgagtcaatgcgttgggccgcattaaactttaaagtttctgaatttgaggacacgactttatgacaggcaacctctcagtttttcagaatagaaataatcctttcagtcacatgagagaacagtgtcttctattttaagtagtcaactttctctttagtgttgtttgtatgtgggcaaaccctacccaagtttctgttcctgaaatcaatttcttaatttgcattaggcaaaagtgttgcataagcttattttattatcatccagctttttatagatctttgctgagagacaatacgggcttgttgaaagaggccctgtttgactgtcccaagccctgggatggagtcctagccctggcacttagcagctgtgggatcgtgggtgaactacttcacctccctgcttctcaggcctctacatctgcaaagtgagaacaaggggagctctttccctaagggccctttcactgtactacttaaaaatgattgcaaagagtcttgcgttaagcaaaactgaacacctgctgtaaatgtctgcacctcagcaacatgacccacagtagaatctatatttagttgcatttggataatcttcctttccccttttgctttagcactttctaccttcaattatttctttattacagcaatgccccctttttgctctactgatgtgggtgagatgcaaatgggccttttgagactcttgctgtgtcccctgggccccagatggacagatgggagacagaacgattgtggagtacatcttggagctgacaggttttgggggcaggaagtgttagtcaacacatgagaaaaatggggtaaacagctggaaaaggctgagcattagctgacaggctctttagccaactgtcctaggactggatcagggccttgtgcatggtgggagaggcacctaggacctgtggaaaggacaggaagccagacccaagaagcctcaggctgcaacctggccctcagttattatcacaaaacttacaaaggtgtgagcctcgtgaatcagctgcaatagattgttgccttgaggacaagacagtctaaacaactaaaaattagccaggtgtggtggctcatgcttgttatctcagggcttcaggaggctaaggcaggaggattgcttgaggccagaagttcaagacgagcctgagcaacacagtgagagcccccccccaaccccccacccctcaacttctacaaaaaaatttaaaaattagctgggcatggtggtgcacacttgtagtcctagctacttgggaggctgaggtgggagaattgcttgagcccaggagtttgaggttgcagtgagttatgattgtgtcactggactccagcctgggcaacagagcaagactctgactcaaaaaaaaaaaaaaacaaacccaaaaagcaaaaagcaaaaccaaaaaccacacatacacaatgaaaattattacaaaatagcctgaacttggtagatccatttcttacaccaggcatggtggctcacatctttaatcccaacattttgggaggctgaagtaggcagattgcttgagcccaggagttcaagaccagcttgggcaatataggacaccccatctctatgaattagccaggagtgatgtcatgggtctgtagtcccagctacttgggaggctggggtgggaggatggcttcatcctggaaggtagtggctacagtgagctgagattgcgccactacactccagcctgggtgacagagagagacactgtatcaatcaattaatcaataaataaaatgaaagaaaagaaaagaaagcatttcttgaataccaagaaacccaagatatgacagctgatgcacatgaggccgtgtcccttcatgcagtgaggtggcaaggcctgaacaggcggatgtggcctctcaggaaacttgtccatgatttctgccttcctcccctggggcagtcctgcttggttgtgtaggaggcaaaggaaactgatggcttgggaaaagtcctgttgatacgaaactaacctgtttaaaatttagtgagattcaagttgtctctgaaaagtaacatttaggctagtcctgttggattgtgcttccaccctactatatgcgtaacctgttcctactataagcagcactcagcatttacatctggttttacagggaccaaggacccattaccattaatgatctgccaagccacacaacagttctgtggaggcagataatgatgtccaatttacagacaaagagggttagatttgaagatgcacagtacttttcctggggccagatccttttaccagacacagggaaatacattagaattttcaagtatgtaactctttgcttttttgcaagccatgcatcctgttgggtgcattccaaagattgtggattctattggtggataccaactcatacacaaaagagaaactgtaggaattctgcccaaaaaggaggccgtgtcttgctaggccctcgggtctctgtagggatgcacctgttgatgtcctctggcctcttgtccatcttacctggtaaggggcttctcccctctaaccccccctcccctcacctaatggatcttccctaaacctagcttttatctggtcagtcctttggaagtttccagagtaagaaatatgaataaagggaacatgtgtacacaactagggggacagtgagtccattagatcatttcagaaaacaatttcagagaacctaggaaagctggaggcgccctgccatccagaagcccttgcacgttctcaacagacaacacacataagaacatcctggcagcatttttattagagcagaaatatggaaatcaatccaaagtttcgttaatcagatgaaaaagtatgagatatgttctctagtggtgctagagaacaatggagatgatatgttctctagtggtgctagagaacaatggagatgaatgaaccagagccaacacctcactgtgggtgaatctctagaacacaaagttgaatgaagaaggaaagtcatggaaaaatatgcacagtaagatcctatttatataaggtttggaaataggtgaactaaacagtgtctgtggggaacagacaaatgcagttaaactatcaaaataaacaagagaatgatgagtgtctaaatcagactgagtggtttcctttgaggggatgggagggacagagaccagggaggggactgcaagggtttacttctttggtgatgttcagttgcctaagctgggtaataggtccctaaggattcattttattattatcctgcaaatcttgcatctgactacacacaaacacctgcatacataagtattctttactttgcatgacatattttgtaatgaaaaaatacacaaataaaccacctctaggaaaacttgccttttcccatagcacctctgtctaactggaagacccttcccagtctggcagctctggccttgtaacatcagccaatgctagtattacattgtgccaggaactgtcttacgtgctctatgtcgtattgccatattcagtcctaacaactctacaagacaggcattattattatccacattttatacatgaggaagctgaggcccagagaggtgaagtcaccaatccgagttaacgtggttagttcatggcagagagagtattggaacctatatggcctgatggaagagtaggaatattgctgatttttttccctctagctttcccttcctctctggctttgcctttcctcttactatttcatgcacattcccacctttcccacccatactcgcacgtgcctggttctctttgatcagaatggtctttctcaagtatatgccacaaaacatcacaaccacaagatcctccgtttaaaaaatgggagtgccacagtcagataaatggagcaaacattgaaaagtaaaacccactctcagaaaattacaatggtcatcagcgattagatcttctaagatgttctaagaatcacttgagcctaggagttagaggctgcaataagctatgattgcaccactgtactccagcttgggtgacagagtgagatcctgtttcagaaaacaaacaaaaaaacaaaacaaaagaaaaaggcatgcagaatacacacacacacacacacacacacacacacacacacacacacacacagtatatgtgcggaaaagattttggattggtgaaatattgaatattgtgctctatttgctctcccccctccttggatttctaatgtgaggggaaaaaatcttccttctcgtgatggttaatattgaatgtcaacttgactggattgaaggatggaaagtattattcctgggtgtgtctgtgagggtgttgtcaaaggagatcaacatttgagtcagtggactgggaaaggcagacccactcttaatctgggtgggcacaatctactcagctgccagcatggctggaataaaagcaggcagaagaatgtggggagactaggcttgctgagtcttctggcctccatctttctcccatgctggatgcttcctgccctcaaacatcagactccaggtgcttcagttttgggactaggactggctttcttgctctttagcttgcaggcagcctattgtggggcctcatcttgtgatcaagtgagtcaatgctcctgaataaactccccttttatatatacatttaacctattagttctgtccctcttgagaaccctgactaatacacttcttcaacttcatttctttataccctctaagattttcctatgtctaccaaatttatgctcagtgcaaaaatataattcattcctctgttcttattccttgtattcatcttctattgccactgtaacaaattaccacaaatgtcgtggcttaaaacaataccaatttattatctgacaattctggaggccagaagtctgacacaggcctccaggggctaaaatcaaagggtcggctggcctgtgttccttccaggaggttccaggagaggctctgcttctttgctttttccagtgtctggaggcctcctggggaccttggctcctggcccgtttctctggtttcaaagccagcaatgaccagtcaattcctgatgctgccatctttctttaaaaactcatgggattagcttgggccacctggataatctgggataatctccccatcttaacatccttcacttaatcacgtctgcaaaatcccatttgcagtgtaagggaaaatattcacaggctctgaggattagggcatccgtatttttggagccattagtctgcttaccacagtgccccaactttcaggaagactttgaggagtgagcagaagtcattgtgtgaccagggaacataattcggtgcagagtcagctgtgttcctcaagctcactatgagactctgaaagtcctaagtccaaggaaatccatggggagtgtcggtgatctggtttggctctgtgttcccacccagatctcaccctgaattgtaacaatccctacgtgtcatgggagggacctggtgggaggtaattgaatcatgggcgtgggtctttcccatgctgttctcatgatggtgaataagtctcatgagatctgatggttttataaaagggcaattcccctgcacacaccttcttgcctgctgccacgtaagatgtgcctttgcttcccctctgccttctgccatgattgcgaggcctccccagccatgtggaactgtgagtccattaaatctctttcctttataaattacccagtctcgggtatgtccttattagcagcgtgagaacagactaatacagttggaaaggagaattttggaggagccgtgttcttcttgtcttggtttgtggatgtctcattaagtatgggagggtttgttcttttagcagaaatgttggtctgtactttcaaagtatttgtgttgcttggaaatttgtattgttaacttgttaagtaggaaatttgcttagttaactgttactgagtggggcagaccgaaagtgtctgggcagaggcagttccctggtggatgctaaggaagggcctgtatttggggctggccagaatgctaaaggatagggcagggtagtctgtggtcaatgccagcagatgagtcatggagtatgatacggggattggcgtatctgatgggcgtgaagaggatggccactgggagcaccgagtacccagcaggtgggcagtcaggcagcaggccacagggaagcctgtggagaaggactctggtccttaagacaaaggggagtaaaccaagatagcacccaagacctacagggatgttgctataaggcccttggctgagacacgaactcgggcacagagaacacagcagcagcccgtttatcaaactgggatccaggggggattgtggcagtgttccccaatggtgggtctgctgggttacagatagttcaattctgcattgtgtggctatttcctgaatattgcaggaggtttggtatccctggttcccacccaccaaatgctggtagccaccctaagtcattttatcaatcattttgggatagtgctctaagacattttcaaatgtccccttagggggtggtaatttgctcccaggtgatactgaaatatgaccagcctaaggttggaatggatcccaggactaggggcagctatgagcctggggaataacccgccagccctaggagtgagcagatgtgtatatagaggtaggcctcataagtacgagagacgctgttgttgttttgttgttgatacaatggaacttatttttcaaggctttttgtagtaatttatgccctggctcctccattctctcagccatcttccttttttcccttcctacttgcaatgttattattttttcttttccatgctgactaccctagctgttgactaccctacccttgttgtgtctgtggatggttgtaagaggtccgtaaatgactattctttatcctgtcccttcgttgcatcagctgctctccctttgccttctggaacattctttcaagctcagatctgatcattgttgcccagttaatgagtcttttggggtccctactgccagcccagtgaaggccaaacttggctggcactgaagacccttagccggtcttgctgggtggtcttccagctttatgtcccagctctagaatctacgattcttttggtttcaaggtcttcattccccctggcacacccttggccatttgcttccacaacctctacatcatcaacgacctaccccatctttccctttatgcatctccatcttttaaggactgattcaaatgccaccctatccatgaacagtaaagcacactaatagatatgataaggcttctcaatttttttttttttttttgagacagagtctcactgcgttgccaggctggagtgcagtggcacgatctcggctcactgcagcctccacctcccaggttcaagcaattctcctgcctcagcctcccaagtagctgggactacaggcgtgcgccaccacacctggctaatttttttttgtatttttagtagagatggggtttcaccatgttgaccaggatggtcttatctcctgaccttgtgatctgcccttctcagcctcccaaaatgcttggattccaggcatgagccactgcacctggcctcaaaactttttaaaaagtattaaattactgattttatgtggtgttcctatgaacagacattataaaggtttagatgcttctcaccttcttttagccatgaaatggcatccatgttgatgcaaggaccatatctagatttgggtagttagtggtggaaaaaagtaagtcttaaacatgaaaccgcttggtttctctctctcaatgttgttttcttcaaaaataaaatattgagttttctaatatgaaggtggtatttttttctgttttttttttttttttttttttttgagacagagtctcacttggtctgtcacccaggctgaagtgtagtgctgtgatcatagctcactgcagcctcgactgcccgggctgaattgatcctcccacctcagcctcccgagtagccgggactacagtatgtgccaccatgccctgctaattttttatttttgttgagatgggggtcttgctatgttgccttggctggtctcgaactcctgggctcaagtaatccttctaccctggcctcccgaagtgttgggattataggcatgagccaccatgctggaggtatttttaattatgacaagttaaactatttttaaaattgttgctcattatgtaagatatctaccccaagagcattttacaaaagttaaagagaagtctgattcaatctttcatactgttgagctggaaaatctcgagtaatagataaatccactctgaacagcagagggctcttatgtacacaaaaaaatctgactgcttttaaagagcatcagcacaggtgtgtgaatcatatgttctcatctgtgtgcctctacaggtacgagtgtcaacaggtgtaatgactgctcacggccaccatcactcatacctttctatttcccagtgttgttagaaagagcaaaatgagacagcctgtgggaaagtattgtagcaactttaaaccgagatgcaaatgggaaatattattattaatcagtaaaactacagaagtaataatttcacaagattgctgtaagatgaatgagctaaggcacacagaggtgtctgtaagctgtaagctgctgcacaaatgcttatttattttattatttttttaactgcagcctcaaactcttgggctcgagtgattttcccacctcagcctcccaagtagctggaaccacaggcacgtgccaccacacctggtacaaatgcttgttgtttgttgcctgcttgcaaggggctctcagctctgtgtttccaggcctgggctctctctagaattccagagctgcatctataatgttctgcttggaatcccttcttaatgcctaataggcatctcaaaattaatggagctgaagctgaactcttgatccactccctaccccacttcaaaaagaaaaaaaaaatcaattagtccatccccagtcttccccatctctgtcaatggcacccagctgctcaggacacacatcaaatttttaattctgctgtttttctcattttgctgaatccagagtaggtcttgcccactctcattctgaggcacatctcaactctgccctccctctccgtcctctgtgcttccagctagcacgaggccccacagttgctcatctggactcctgccaagagcctactaatggttctctcttcctcctccaatccattcctcaaacgcagcagggtgttcttccaaaacaaatcacatcatgccactcccttgcttaaaaccctcccaagtcttctccattgcacttaaaattaaaaccaccatcctttccttggctgagaaggtcccacctggtcaagacccttcctacatttgcagactcatctcccaccatgctctgtcctctaccccactccagcccctctgtccatgctgtggacacagcaggcatggattcctcatcttttcgtggctgatttctttgatgcatcccattcttggcttaaatatcacctcctcagataggttctccctcacccaccagtctaaagcagtgacccattctctctttcttcattcaccctacctggactctctatgaaacatttcccagtagttggtattacacaccaaccacattatgtccttaataaaccatttactttcatatttcatctagtgacataatttcattaatgagatcattgagctggtgtaccatacctctttgggattacagaatacaagaaatgaatacagaaaatgctttaaaaaataagcaatgacatgggttgtaatagaaatagccacaacctgttagtgttccccctccactcagagaatcagtgactttagaatgttggggaaaaaggccaggtgcggtagctcacgtctgtaatcccagcactttgggaggccaaggcaggcagatcacccgaggtcaggagttcgagaccagcctggccaacatggtgaaaccctgtctctaccaaaaatacaaaaaattagccagcatggcagtgggtacttgtaatctcagctactcgggaggctgaggcaggagaatcacttgaacctgggaggcggaggttacagtgagcagagattgtgtcattgcactctagcctggacaacaagagtgaaactctgtctcaaaaaaaaaaaaaaaagaatattggggaaaaaatccacgcaaaatatgactacaaatgagttatccatcaacatcaccagtgtcgaatcagacttcttactttaggaatatccctgacttattttgtgtgctcttccctccagttatcatcaaatatttatcgagcatctactctaccaaatgcagaggaaatcatgagaaataacagcagcccactaggaccacttcccctgaacctttttttctcccctctccatcactcccctcttccttgtgtgaaaacataatttgtgaatacatagaatgttctaagcctgttcctaaatgcatgttttgcttatttgggggaggcagcagcaattactaggcagttgaatcaattatgataatgatttgaaatgactattttaactaatacatggtcttggggaagtgctatattcaccttttaaaaagtgaatccactgtagtcttggaaaaattaaccaagtctgtacatgccaatggcagtctcttggaaaatctgcaaggcaaataacccacatgtttgggacccgctcaccttcagacatcctcttcctgacccagatgtgtctgccttctggtaagcccctccaactgtaaaatcccctccacccccacccccgaaactatccttcttcagaggcttctcctccagtgccatgtctccctttccatcttcaatgaaaactcctatgtatttgcagtaatgtttgattaaggtcatttatacacatgtgtgaatgactgatagtcttaactcaccaggttatactttttctttgaaagagaactttaacgaaactctaattcggaaaaagctattagcaaaatattttagagcaaggtattgggagcctctctttatgagccgtattaccttgggcaagtgacataacctctctgtgcttcattttcttacgtgtaaatggggattgtaaaactcataagattgctgtcaggattaaattaatgtatgtaaagcacttagaatagagctcggcacagagaaatgctacatatatattagctattactgccactgccaccaccaccatcaccaccaccaccaccaccatcaccatcatcatcataatcacagccaccaccaccatcatcaccaccaccaccaccaccatcaccatcaccaccatcaccgccaccaccatcaccatcatcatcataatcacagccaccaccaccatcatcatcaccaccaccaccaccaccatcaccaccatcaccatcaccaccatcaccgccaccaccatcaccatcatcatcataatcacagccaccaccaccatcatcatcaccaccaccaccaccaccatcaccaccatcaccatcaccaccatcaccgccaccaccatcaccaccgtcatcaccaccaccatcatcaccatcatcaccattatcaccatcaccaccaccaccaccatcaccatcattagcagctatttaatcaccaccaccaccaccaccatcaccgccaccaccatcaccaccatcatcaccaccaccatcaacaccatcatcaccattatcaacaacaacaacaataacaacaacaacaaccatagcaacaattacatcaccacaacaaccaccaccaacaccaacatcaccacaccaccaacaaccaccaccaccaccaccatcaccaccaccaccatcaacaaccaccactaccatcaccaccaccaccatcatcaacaccacacaccaccaccaccaccaccaccaaccaccaccaccaccaccaccaccaccacaacaaacaccaccaacaacaacaacaacaacnnnnnnnnnnnnnnnnnnnnaccaccaccaccaccaccaccaccaccaccaccaccaccaccaccaccaccaccatcaccaccaccaccaccaccaccaccaccaccaccaccaccaccaccaccaccaccaccaccaccaccaccaccaccaccaccaccacaaccaccaccaccaccaccaccaccaccaccaccaccaccaccaccaccaccaccaccaccaccaccaccaccaccaccaccaccaccaccaccaccaccaccaccaccaccaccaccaccaccaccaccaacaccaccaccaccaccaccaccaccaccaccacaacaacaacaccacacnnnnnnnnnnatcaccaccaccatcaccaccaccatcaccaccaccatcaccaccaccatcaccaccaccaccatcaccaccatcaccaccaccgccatcatcatcaccaccaccaccaccaccatcaccaccatcaccaccaccaccaccaccaccatcaccaccaccatcatcaccatcaccaccaccactgtcatcaccaccaccaccatcaccaccatcaccaccaccatcaccatcaccaccaccaccaccaccatcaccatcaccaccaccaccatcatcatcactgactactaccatcaccaccaccaccaccatcatcaccaccaccatcatcatcaccatccctgccaccaccattatcacccaccaactaccaccaccaccaccaccaccactaccaccaccactaccaccactgtattagtccattctcatgctgctaattaagacatacccgagactgggcaatttacaaaggaaagaggtttaatcgattcatagtacagcatggctggggaggcctcaggaaacttacaatcatggtggaggggaagcaaacacatccttcttcacatggtggcaggaagaattgccgagcaaagggggaaaagccccttataaaaccatcagatctcgtgaaaattcactcattatcacgagaacagcagcatgggggtgactgcccccatgattcaattacctcccaccaggtccctcccacgacatatggggattatgggaactacaattcaagatgagatttcggttgggacacaaatccaaattgtactaaccactatcatcaccccccactaccaccaccaccaccaccaccatcatcatcattaccatcatcaccaccactaccaccatcatcgtcaaagcttcttttctccattacttcagaaggtcttggggcagcggctttattttcccctttccttcggtaaattcagtcttgtgtgtctgctgcttattaacatctccaccagggggcaggctgtggaagaaaaaggttcaatgcaagactttactctgtccttgaatttcggagctgccagtgtatgaattcttccagactctccctgacagaaaccatctttatatatctgctaagcagttctattttttaatttctctatcacaaagagttcctcttgttccgtgaaatatgtatggttttgaatatttgaacccgatgttttcctctttgctctaacttctgaaatgttttgccaaatgtgggaaagtggagcttgatatgagtcaattgcattttttttcctgccaaaaagtgatttcaattttcagctgcagacataggcaaaaggtgtctaggataagagagtttacacttctgggccagcaaacatggtggcatgcaggccacacttccctcctctgtgctcacagatggcatggttgatagatgatggcaatcttcctcactgagtccaaaggcagttctagatactttctcaacacaccacttcagtcagcttctagcgatcaatggcacttgagataaaaccaacttggcatttctgagatgttctacgtcacactccttccatcactctccatttgaagcatagtgtttgggtcagggcattctattttcagaagaatatttgtgcagtgatgcttaatgagggcagctctcctcccagggtgtgcaaatctgtggccatttcttagtaatcacagccagtggggacacatctggcacatggtaggtgggagccaggattgcttattcaccctgtgaggtgtgaggttttccctcatgatgaaaacttctctcccagcctgtgctagttttgagtatcttgttggtcatgtatataggtgaaaaacctgttgataataatctaatgccagacctgaactctattttgtatctaacacacattattttcctgtgcttttaatacacacagaatttcccagttgtataactatcacataaattgaaatctatccctctgttttgcagaaacttccccaagagttgcttaccatttctgaaaattgcctcaccaatgacagcgctgcccctgggatctgagttgccaaagcagcacactgggttcagcatgcacgggtagtggtcctgttcacagggattttacatgcaaggcacgcatctgacttcttactgacgtcttctattgtagtcacattgtcatggatgtgtggtggtcatgctatttatggattctatttcagacaacaataaaataggtggttccaatatttggtctagaaagagagtccactaggctgggtgtggtggctcacgcctgtaatcccagcacttttcaaggctgaggtgggtggatcacctgaggtcaggagttcgagaccagcttggccaacatggtgaaaccccgtctctactaaaaatacagaaaattagccagatgtggtggcaggtgcctgtaatccctgctcctcaggaggcagaggcaggagaatcgcttgaacctgggaggcagaggttgcagtgagctgagattgcgccattgcactccagcctgggcaacaagagtgcaactctgtctcaagaaaaaaaaaaaaaaagagaaagagagtccactagatagagacaaagggttgcttttcttatctctgttgaagaagggggtgcaggcattatatgctggccttcgtgtaaaatgctaagctggggggtggatgtgcatgagtgaatgtgtgtgtttagtgttttacttttttttttttttttttgagacagagtctttctctgttgcccaggctggagtgcagtgatgcaatcccagctcactgcaacctctgcctcccaggtgcaagtgattctcgtgcctcagcttcctgagtagctagaattacaggcacgtgtcaccacgcccggctaattttttttgtatgtttagtacagatgggggtttcgccatgttggccaggctgatctcaaattcctgacctcaagtgatctgttggcctcggcctcccaaagtgctggtattacaggcatgagccaccatgcccggccctagcgtttttttttttttttttttaatagtggtaactgacttaggctgacccacttccactctttccagatccaaaaaatgccagaagcacagattttggggagacacatcatttggaagaggcattgccctggttcataatgggccatgtaagattcactgatctatgtgggatccaagaaaccaatggccgatcgtttctatcatgctctaagaattttgggtcttcaaatcacttttaagtttatgacctctaagaatagatttagaaatgacatcttatggccgagtatggtagttcatgcctgtaatcacagcactttggaagtctgaggtaggggggacctcttgaagccgggagttcaagaccagcttgggaaacatagcaagaccccatctctaaaattaaaaaaaaacaactcactgaacatggtggcacatgcctgtagtcccagctactttggaggctgagacaagagggaggctaaggcagggggactgtttgagtccaggagttcaaggctacagtgaactatgattgcagcactgcacccttaagggtatcaaaaaacaagtcatcccttacggtatcaaaaatctggaaacagcattcttttttgatacagcaacctcctaggtatttattctgaaaaaaatattgggaaaatgtgcaaagatggataaacagtttgcattatcagtaaagaaacaggaagaaaaatctagctgttgagcaatagagcaccgattaagtgaattagttacatttatctatctatctatctatctatctatctatctatctatctatttatttatttgagatggaatctcacttggtcacccaggctagagtgcagtggcgcgatcttggctcactgcaagctcctcctcccaggttcacgccattctcctgcctcagtctcccaagtagctgggactacaggcacccgccaccatgcccggctaatttttttttctttgtattttcagtagagacggggtttcactgtgttagccaggatggtctcgatctcctgacctcgtgatccgcccctcagcctcccaaagtgctgggattacaggcctgggccaccgcacccgccctagttacatttatttatttatgagatggagtctcgctctgtcacccaggctggagtgcaatggcatgatctcagctcactgcaacctctgcctcctgggttcaagagattctcctgcctcagcctcccaagtagctgggattacaggcatgggccacgacacccggctaatttttgtatttttagtagaaacggggtttcgctacattggccaggctggtctccaactcctgacctcaggtgatccacccaccttggcctcccaaagtgctgcgattacaggcacgagtcaccgcactcagaagttacatttatatactggagaactatccaccattaaaactaaatttatatttactaaaatggaagggcaaaactaacatatttagtgatgatagactatatgtatattattactcaattcaaaacttttatatatttacatataaaaagttctggaaggacattgatcaatggcaaggggagaaattaaatgccattaaatttctgtttccaaaaaattttcataatagttatgtattaagtatgtaatttcaaaattaatatattttcccccaaacatttaaaataaacaaacttagtctatatgcttgctgtattaatttgctaggacagcctccacaaagtaccacagactgggcagcttaaccaagagaagatcattttcttatgcttctggaggccgaaagtcagagctcaaggtgtcagcatggctggtttcttctgaggcttctctgtttggctgtagatggctgtcttcctcatgtgtcttaacactgtcttcctcctgtgtgttccaatctgttcctaaaatgacaactgtaactttggattaggcccccccgccgatgacctgatgatttaacttaatgattgtttaagactctatgtccaagtccagttacctttggaggtactcggggttaggacctacacatatgaattttagggaggactcaattctgcccctactcttgccttctaaataaaatatggaagccttgtagttttcataggaaacaccttctgttaataaatattagcatgacatgatcatactaataattattttatagcagcggtccggaacctttttggtaccaggcactggtttcatagaagataatttttccatggactgggggtggggagtggttccaggatgattccagcacattccatttattgtgcactttatttctatcattattacattgtaacatgtaatgaaataattatacaactcaccataatgtagaatcagtgagagccccgagcttattttcctgcaactagatggtcctgggggtgaggggagacagtgacagatcatcaggcattagattttcataaggagtggcaatctagatccctcacatgtgcagttcacagtaggatttgtgctcctatgagaatctaatgccaccaccgatctgacaggaggtggagctcaggtggtaatgcgaatgatggggagtggctgtaaatacagatgaaacttctgtagctctccctctgctcccctcctactctgcagcccacttcctaacaggccgtggactgatactggtctgtggcccggtggttgagaactcctgttttatagcttgataaaagctattttatacatttggacagagattctcaaaatgtctctgttgacatgaagaagatgcaaatgcacactgacaaagcagtcttccttccccagcagattcatggattgcagtattggaatcaagtcatgcttctttttaaaaaaattgtgattcttattttcctttttgtattcacatctcagcagcagaaggaagagtcatgccttcttaatttcaggtcagcagtcagtcagtccacatttactggacacccacagggtatggcacattttactaggtgtgggggcaaactaaaaataaatagaagcttaattcatgccctaaaggagcttttaatttcctggagacacagaacactcctgctgaacacaaatacactaataataaggaaacatttcatgtgagatttagagataagcagtctaacttagtttgtgaagggtgatatattttgtaattaagtgactacagagtaatgggatggccaggactggccctcagacctcttgactccctgtggaacttttcccatcaggtcactctgccaccaaccctaatgagccccatcaactgcagtacaaatctgtgccctaaatattgagggggagttcaagtaaagaaaacaaaatcagattttttttttttgagaagaagtctcactatttcgctctggctaatgtacagtggcgcgatctcaactcactgcaacctccgcatcccaggttcaggtgattctactgcctcagccttctgagtagctgggactacaggcatgcatcactatacccggctaatttttaaatttttaatagaggtgggatttcaccatgttggccaggctggtctcgaactccttatctcaagtgatctgcctgcatcgacctcccaaagtgctgggattgcaggagtgggccaccgtgcccagcaaaatcagatgttggtatcatgaaaagcatatcaaatgcattttggagaaaataagaaacatggattaaaaggaaagatgagggagcatgagctaagagttggtctaagagttggcggcgtagagtgatacagaaagccaggagttcctctcaaaccaactgagggagatggttaaggctgtgagaggcaggagaggttcttccgtgggaaaggacaggtctgtatgagctgagggaaggggctgcatagagtcgtcacaggactgagactggcgcagggaggcagaggtgagcctggcagaagtttggatgtcacagccccctccacattccatagcttctttcattgcaacttgtttcttagttcagttagtagaaattcagtcttttcttggggatgctgaaaagtccgtgggtattattccataaaatccagagcagtggaaaggatttgtttgagcatatgtgtaattatgtgtgtaagtgtgtgtgagtgactgtgtgagcacgtgggtgggtgggaatatgcacgtatgtgagtgtgactacatagaatgtgagaatgcacatatgtgtctgtgtgtgtgtgtttgtgtgtgttgtatgtgagagtcagtgtataggtacattgctcctagaggtcactgtacttgtttcctattgccactgtgacaaaattaccgcacatatagtggcttgaaacaacacacatttgttatcttacagttctggaggtcagaggctgaaatgggcctcactgggctaaaatcaaggtgtgagcagggctgtgttctttctggaggctctagaggagaaactgcatcttgctttgtggcactttctccatcttcaaagccagcctttctcctcttgaatcctctgacctgctcctctgcctctctcttctgcttttaaggatccttgtgattacattggccctgcctgaataatgcagtataatctctttctcttaaagtcgactaattagcaaacttaattccatctgcagccctcgtttccatgtaacccaacatatgcacagattctggtgattaggagggtgacattattctgcctaccacagttaccatcataatctgctttcataaagcagaaatgcctctttcccctttctccaaatgttgaaaggccttggaggggcaggaggcccaggcctggagaagcaggtgtattttgcaaacacaccccagggggttctgattcagcctcactctcattgtgatccactggtttaaatgttagcttaaaacagcatttatcttttcacaaatagcaatgacagaaaggacttttgcgatgatttaacccattcatttttattcatcaggaaagggagagctcagctggtgaaatgacttctccaaggtctcccaggttgtgagggtagagctagatcacctaccaacatcctcaaagctccatccactgctcttcctatggttagattcatcaattttacaagattatttatttccctgccttttctaaccaagagagatgtggtttctgtggataagatgcttacatggttttgttgcctttgctgccggaggcacataatgggttgaggaggtgagacccaaggtaaatatgcctggtattcaatctggagtgtcgtggtatcaagaagatgaagataacttggaagaggtttacaggagatcagctaaaatgatgaaatgagggaagagtgaagcagataaggagggaatccttcactaggcagccagttggctggaagaaagcagactgcaggacttccctgaatattttcaagctgggatataaggttcatgctgcttgcaagttgggcctcagcactggaagtctccaaattagccgtggtgaagggaaatcaatgtctttgagtccatcagttggttccatttctactccgtggccactttgcatatgagcccatcaaacagtcagtgaggtggctgggaaggaagttgactgatatctacagggctgataattttgtccactggtttattcattacctttcccactgtggagtagggtctttgggagagagtacactttcgggaaacttttctagatgctgatccacatacctcctcaaacctccctgtggctaattctccaatcttgttccttccatgttcatgaccagctatccaaacattagccacagcctgaagcccaagagtctgataatgcttttgcacctcaagttctctcactgtccagcaagagtggccaacaaagtgctccactcacgcttccatcctctgagattggttccctttacccgcagcctttagggccattcaagagtgaggatgtagagccagttgtttaattctggttggagcaagtggattaggcagatccatctgaggccacgcttggctttaagctgtcatagggaacgccccatgaggctggaggttgagtggagagaaggatggcggcatggcaggggtgaggctgctgctcatggaacaacttgtgtcatcacagcctgcttaagctcccgcttgactgtccctctgccattgatgatggagctctgtggatcacatgatcacactagacttttgttaaggcagaaaaactgaccacttcaaccggggcaatccagatcatgtggccatttggcattcaacaatgccaccaacattgttgaactgctggctaggatctagtttttttttttttttttttttttgagacagagtctcactctgtcacccaggctggagtgcagtgacgtgatcctagctcactgcaacctccgactcctgggttcaagcaattctcctgtcagcctcccgagaagctgtgactataggcacaggccaccacacccagctaatttttgtatttttagtagagatggggtttcaccatattggtcaggctggtctcgaattcctgacctcaggtgatccacctgcctcggcctcccaaagtgctgggattgcaggcatgagccactgcacctggcccaggatccagtcttattgcaatggtttgcaccaccggcaagaattcactgtcatccccacttgcctgtatcacttggtcttaaagcaaattgcactatgattatacgaggcccaagcaacctaggatcacatgcctacgcctgactgcgagggtagctgggaaagaaaatatcttgtgttttcagcttctgtagtgggtgggtagacaagctttataaaaagagattttctccaattactagaaggggattcagacgttaggcagtcaaaatatctccaatatatgtttcctccaccctttttgaaaaaatacagaaaaatttaaagaagaacataagaataaaatgtaatccaataactcagaaataaaaaatttattaaaatttagatgcgtttcttccacatatcctctaatgaatatttgtcttataagaacaaatatttcatgaggtcagggatgtcatctgttttatttgccactgacttcatactaataaatgcatgcctaaatgaatggttgtttcataaatcttcaactagtattgcaatcatttttcattattaataatgacctttatgcaatcagttttaatggctaggtaaggttttatccaatgaatgtaacattacatttctagtgagctgggtctggtctaagaatgacactgttgggaaatgaagtgattcttgccattccttgcctcttctgcaggcttttctttacttttttttttttttttttttacagtatctcactctgtcatacaggatggagtgcagtggcgtgatctcggctcactgcaacctccacctctggggttcaagtgattctcatgcctcagcctcccgagtagctgggattacaggcatgtgctactatggcctggctaatttttctgttttagtagaaatggagtttcaccatgttggccaggctggtctggaactcctggcctcaagtgatccacccgccttggcctcccaaagtgctgggatttcaggcatgagccaccgtccccagccatctgcaggcttttcaaacttgcctgaaagtgacagcattcactacttgcctcttatcattaatcttgattttcccccaaaccaaagtggtctgaggaagcaaagactaattatttgcaatggatcagggcttgaacacttaagtcttctgtggcagaagcagaaattcaattaacaaaactgtttcatggttgttggcttgtttgtgacactcctgaggttctggtgaagaagcagaacacagatgcaaatacaacaatgatgatgtgttgatcaactcgtggatagacattgttctaagtgcttcacatatgttatctcattgagttttcacaacaaccctatgaagtattatcccccaaggtatagagaaggtttcacattgctggtgtaatcccagagtctgcagcaagacgatctgactcattgacatcattctaggtgtggtctcaaatgagcttattcaagtgcatttttggcaaagaaggacatgaataaaaagcaccgagaaatgggtgggtttttttctcttaaaatgatggcaggggctgggcatggggtggatcatgcctgtaatcccagcactttgggaggccgaggcgggcggatcacgaggtcaagagatggagagcatcctggccaacatggtgaaaccccgtctctactaaaaaatacaaaaattagccaggcatggtggtgctcaccgtagtcccagctactcgggaggctgaggcaggagaatcgcttgaacctgggaggtgaggttgcagtgagctgagatcatgccactgcactccagcctggcgacagagcaaaactccgtctcaaaataaataaataaataaataaataaataaataaaatgatggcaggatgtataactccttttgggaaccacagaagcccctagctatttagaacaggttgaaagacctttaatgatttctttgggagaagagcttcttggcaattcaggaagacaggttggtaacttggggtttacagagaatctccttgccctgttctttcttctttggctctagaaacccaaacagggcacctcctgaactggaatgagagaagtactctctgactcattccactgactcttgcctcaatcctcctttgacctgggcttcttatctgatcaggagagaggaatatctcataacaaacctccatttaattgactccccaaattaatgaacactcttcacgccctcccaagaacacacactaacacttacagcaagttgaatgctcatagctagtcaatgactctctcgtgcacccatgcacccacctgctgatttacctgctgtgcttaccaagagttagttacattagctcccaaacctctttctgccatttgtactcattgctgtaactaactaatttaattattaggggaaccactttattcaacaaattgaacatctacagtatgcaaggcaatgttcttcatgcttggaataaatcagtgaacaagaaaacaaagatcccctttttcatgacacttatattctatgcaaaaaaaacataattacttcacagataattaagttgaatgctttggtaagatccaacaaatgtaagttgcttaaaatttttgcttaatttggtgtggttgagacaactgtaaaaagattgagaaaaatattgcaaggctctggaaggattccacactcaggatacttcacaagtgtctttaaattctcgttctattttaaagaaatcataactagaaatatacaggcatgatttatacaagaaaaacaacgaagaaatccaatgagcaaatccaaaggaaggccttggacttacatcaaaaaattttttacttgttttacagtaaaatgaaatgtttaaggttaaatatttatctttttttctttttaaaaatgaattttcactgtaagtggctttttcgattgacagtcgacaactagtcccaacagagctgaatgaaagtgtttctactctatttttcttttcttttttctgttttacttctgagacagggtcttgctgttttgcccaggctggagtgtggttgcgtgatcacaatttaccatagcctccacctcctgggctcaactgatcctcctacctcagcctcctgaatagctgggactacagccacgacctggctaattaaaaaaaattttttttataaagacggggtctcactatgttgcctcggttggtttcgaactcctggcctcaagggatattctcaccttggcttcttgaagtgctgggattacaagcatgcactgctgtgcctggccttactcttatttttcaaggactgcttgaatcggaatcactagggagctgcagccctgaattggaagttctagggtgggcccagaacaaactctgtagggatcaactcagaagagttggctagcgagggctcttctgtcaatcagggcaaatttcctgagtccttggtttgaaccttcaatctggaggattaaggctcaaggtaccatttggtgggaaggccctatcctgtctccagagggaaaaaccttttaggggtctgtttttgacttgtgtcatagcagaaacctggtattacaagaaaggaagttggccgggttccatggcccacgcctgtaatcccagcactttgggaggccgaggtgggcagatcacaaggttaggagttcgagaccagcctgggcaacatggcaaaaccccatctctgctaaaaatacaaaaattagccgggcatgcctgtaatcccagctactcggaaggctgaggcaggagaatgaattgaacccaggaggcagaggttgcagtgagctgagattgtgccactgtgctgcagtctgggtgacaaagcaaggctctgtctcaaaaaaaaaaaaaaaaaaaagaaataagaaatgaagtcaacatgtaattctttgtgcccagattagatattccgaggagatgaagaaagaaccttgttcttgagcagtttataatcttgagacaaactcattacaaattactaggttatattactagacagcagacagtattattagtagcaaaatcatatgcaatgcatccgttagaatggtgagagtcttgtggtcccaggttgcccaggactaaagggttggctgctacacagggctttcagtattaaactgagatagtcccaggcaaacatgatggctggtcaccatggagaaggatcgatttgcgtgcaagcacagctggggaaggctttgtagatgagggagatatctgagtgggcgttaaagtctagaagaatgtacagcagccgggagctaggaggagagaggcagaactgtaatttgaatgcatgagcagcctcagagattcccagcactattcgtttaaatccaggtatttaaaacccagtgtgtttttagcgatcacttggcgtgttgctacaagaagtgtgacacagctaagtggttctgcgagcagaagtggtaacagttcatatgcacacccacctctgagtacaggttaattagcttgtgttggcagagcctttgagtgtgtgcagtacgccccacaacccggatattattagccagttagcaacaccttaaaaataccacattgctgcagtcccttcagctcttgtttcttcccaatttctttgaaatagctggattcctgcagatttcagcatgagcctctcactggtactcaagtggacacagtgcctgacacctgcgtgaatgtgattacaaactgaccctgggcctgggctgcattattgctccgctgcggggccaatttccaaacagtatgctgctgcattcctgttagaacaggttgcatttatcctctctgtctcttctcttgttggcctgttcgtagacatggtttctacacacacacacacacacacacacacacacacacacacacacacatctttcatatgccatacatgtgatatcatagaccatatgatattacgtaatacatcttataatgagagatatgctagtgtcacccaacgaccacaaaccctggatgacagcctgctcttgcttgagctcaggctgagtcctatgtcccttgggtggggcagaagagggaagggcttcagcacaggcgacttcctccctgtccagagctgctgccacaggagttggggggtgagttgagccccaccgtggagcctgcttcctattcacaggcagcttcaagcttagccaggcaaaacgaccgtggtaatggctgaactctcaaaagcatgtaagtgtggatgtgtgtgtgtgtgtgtgtgtgtgtgtgtgtgtgtgtgtgtgtggaatgggtgtctatgtgtatatatgtatgcatatgagtttggaggcatgtgtgctatatgtatgtgtttggagagggtgtgtgtgtgagtataggtgtgtgtgggggaatggaatggtatgtgtatgatgtgttcatgtgatcccaagagttgatagttgtgctctgagccccagcagttgcacaagtttgccagccctcagatgtgggcgcagaagacattcctggctccctgttctggcaagagagtcggtgacagccctgcagggggactggagaatggggagtcggggagtcccaggtgtggagcacaggaagggcgggaggccggtttccaggcctgggcgagcctcccatcctcacccctctcccagttagagtgagaggcagagggagtgacaggctgattttgctgctagcagtcatcagtctcggacctgctgccaatctgcggagctgctgtaagcagctccccggctattgtcactgagcagtgacacacagatcggatgggatcctgtgctttgcggctccaccctcggctggggtctcctgaataagaaagtgcacgcccagacaggtctgcctcagtcctgctcatggggggcatgccaattccagagcttccctggatcaggctgcccctctgccagcccaccacgcaggtgggatggagtgagcagtcagcagagccgattttcctcagagctcttataaagcctgagtaaaaacaagctcaaagtgttatttctattctctcactccacaacaattaacatagaagacttctgagaccaaatgtgtgtgagtttcccccacactccaagcaagcaatcagtctgcagcggacaccagctggctgtactccagttgaatgccatctacctggagctagcgtcacatcccacagggccaggggctcagcccccaaggctgcccccctcttctgatgccaatcataagcccctggttattttgcctgtgcttgtgactcaccagctctgaattggggttcccacaacctcctcctttggttcgattaatttgctggagctgctcacagacttcaggaaatccttatgtttaccagtttattacaaaggatattttaagatatacaaatgaggctgggcacggtggctcacacctgtaatcccagcactttgggatgccgaggggggcggattacctgaggtcaggagttcgagactaacctggctaacatggtgaaaccctgtctctactgaaaacacaaaaattagctgggtgtggtggcaggtgcttgtaatcccagctactcgggaggctgaggcaggagaatcgcttgaaccccaggaggcagaggttgcagtgagccaagattgagccactgcactccagcctgggcgacagagtgatactcctttcaaacaacaacaacgaaaagatacaaataaacactcagatgaagagatacacaggaggaggtctggaggagtcctgagcccagagcttctgtccccgtggagttggggtgcgccacggtccaggcacatggttgttgtgtaagcccctgtgtgtctggctatctgctggctctctgaaccccgtcctttcgggtttttatgtaagcttcattacgcaggcatgattgatgacatcattgggcattggtgaacaacttgaccttcaacccctctcccctttgctgaggttggggagggggctgaaagtcccaaccctctaatcccgccttggtctttctggtgaccagcccccatcccaaagttatctaggggttgccagtcatcagtcaaatcatttacatagagaagacatcactttggagactctgaggattttaggaattatatgccaggaaacaagatgaaaaccagacgtgtttcacaatatcgtagaattccagaaatggaggctactcttgcaggactgctatacatgagccttgaaaaatcgatatggcagtacaatacacactagccatttactgtttggtagtggagggaggggtggagtcttaccaagtaaagcagtggtttaaaaacacagacagatggagacatttgagccctggagtctgaatatcaaagattcctggaaattacagattcctggggtttctctcctgacaggtttggacaagagttccttggcctctgggtgtccccccaacccccatcccaacagtggtgccctcataaattattgcaaaactgacccagtgtggtcttaaggaaagggaaagatgtgtaaataggggttaagggctatttaaagggaacaatctcctccctcatattactttttttttaaattttattattattatactttaagttttagggtacatgcgcacaatgttcacgtttttaaaattgactcaccaaaggccagcatggcctgtgaccctgtgcctgcaggctcacattttctaaatgacaaagtgcttcctgcctcccgacagcatttcagacaagtcaacctcgggtcactgttttttttttttttttttacccgcttagaattgatgggttcccttggtcttcggtgagccccttcagtgctgatacccatctggttattcttccttttttctctcggtctttcattcctttctttgacttgtgttgacaaagcacctaggaatcatccttttgaaaaaattgttttactcttactgtagtcagcaaagttcactttatattttctcaatgttcattttaaaagtagaaatttctccaggcacagtggctcacacctgtaatctcagcactttgggaggcggacgtgggtggatcacttaaggtcaggagtttgagaccagcctggccaacagggtgaagcctcgtgtcttctaaaaatgcaaaacttagccaggcgtggtagtgggcgcctgtagtcccaggtacttgggaggctgaggcaggagaatcgcttgaacctggtaggcggaggttgcagtgagccgagattgcacaactgcactccagcctgggtggcagagtgagacttggtctcaaaaaaaaaaaaaaaaaaaagaaatttcgcttatcggtctttcttataagcattacttacattatagatcagagcgatgcactagaacttttcaaaatgatgggaatgttctgtacctgcaccgtcctattaaactagccaccagccacctgtagcacttgaacacttcaaatgtgactagtgtgatcgagaaaccacattttcaattttacttaattctattcaattaaaatgtaaatagccgcatgtgactagtggctgcagtagctaaccgtgtaagtagggaacaagtacggatctccaaggtgctcctcctccaaatcccagcaaattcagattgctttttccttgagcaacccaggcacactccttcatccttctctcggcccccttggcatgagaggaagtaggcaaacactcagctttttgccctgctgttcctacagctctgagagtccttcacacggtgagtaagaggttgggttcggaaaagcttgctgaaatgtcattaatatgggtgagaatatttcagttcttcgccaagcattttctttcttgacacaacaggtttacctgcttacgcataaaggaaagcaatggctaaaccctgaaatgaaatgcctgggtcccaggtggctcatagttctatttcaatttaatgcatgtttaaacaaacgtaagttattagagttatgtacgcttgaaggtactatatgacgaacattttgggagaaagcttatgggaattacagttacataaccggagaagaatttgaagagtcccgggtttgcatggaggaaagaagctcaaggctgcatttaagcttccaactgaggcactgtctctctaagacattactggaatctgactgtaattgggtgactgttggcaaagacctaggatgagggagacgattaggaagcatctgtttatacaaagaggacaaagggacaaggcatttccagggtggaaaaaaacctcagactttttagcaaaagtcaaaggcaatggtgaaaccctgaaaggaggaagtggctggaaatatagtgcagacaatggtgtacacctggaaaggatctaaaaacccgagagagctcatcagtgtcagaaaacaagattgatgaggcctacctgagcgtgggtgtcagacagagactatgtacgggaacgattcctagatttggagaagagttcttggttaaaacaacaggaggtagccctttatttttctctttctttctttctttctttctttctttctttttttctttctttctttctttttcttttctccttccttccttccttccttccttccttccttccttccttccttccttccttccttctctctctctctctctctttctttctttctttctttctctttctttcaagacagagtctggcgctgttgcccaggctggagtgcagtggtgcagtcttggcttactgcaacctctgcctcctgggttcaagtgattctcctgcctcagcctcctgagtagctgggactacaggcacatgccaccatgcctggctaatttttgtatttttagtagagacggggtttcaccatattggtcaggctgggattgaactcctaacctcgtgatccacccgccttgacctcccaaagtgctgggattaaggcataagccactcctcctggccttcttcctcttcttcttttttttttttttttttaaattgagacagagtcttgctctgtcacctgggctggagttcagtggcatgatctcagctcacagcaacctccacctcccaggttcaagcaattctcctgcctcagcctcccaagtagctgggataacaggtgtgcgccaccatgcctggctaatttttgtatttttagtagagatggggtttcatcatgttggccaggctgatctagaactcctgacctcaaatgatccaccagtcttggcctcccaaagtgctgggattacaggcgtgagcacccagccccctttgtttctttttctatccagctgtgttcatctgcttgggctaccataacaaaatagcatacactgggtggcttaaacaacagaaatttattttcaaatagctctggaggctgagaagtccaagatcaaggtgccagctgattcagttcctgttgagggcccacttcctgtcttgcagagggctgccttctaaccatgtccttaaattgtggagagggagagaaggtgacctctggtctcttcttcttcccaccctcatcacctcatctaaacctaattacctcccaaagaccccaccatttccaaataccatcacattgggggttagggcttcaacatgtgaatttggatggattgtagatattcagtctacaataccaaaaatacaataaatatttattgagcacctactatgtgctagggttgtatcagagtaaaacaccttttcttcctctagaaactcattgcaaacaactgcaactcaaagaaataagcactaaagttctagagtgcacagaggataggggcaaacactgtgtgggggtatagagaagacttcatggggaggtgacatttgaatggggtctggaaggacaagggagacacagagggggtgagtccaagacagaaatgacagtgtgtactaaatcagggagagggtcaaggcaatgtgtgttgaggtcagtgttgatacattgggttgtgggattagaaatgatggatggggtagggtaggtaggcaggagatgacatgcagaggcaggctgggggtggaagaagggctaaatgtgtcatattaaggaatttgaacctgatcccaaaggaaatggggagtctgagggctctggaaatgttttaaccaggaaagtgtgccgatttatgtgcaggaagctagtgggcattgtatctgtttgctggggctaccattaaaaattaccacagattggctgggcgcagtggctcatgcctgtaatcccagcactttgggaggccaaggtgagaggatcatgaggtcaggagatcgagaccatcctggctaacatggtgaaaccccatctctactaaaaatacaaaacaaaatcagctgggtgtgatggcacacacctgtggtcccagctactcgggaggctgaggcaggagaatggcgtgaacctgggaggtggagcttgcagtgagccgagattgtgccactgcactccagcctgggcgacagagggagactctgtctcgacaacaacaacaacaacaacaacaacaacaacaacaacaacaagtaccacagactgggtggcttaacagaaacttattttctcagtcctggaagttacaggtacgagattgagatgtcagcagggttggttccttctgaggcctctgtcccaggctggtagatggccgccttctcactgcgtcctcatgtattctttcttgtatgtatgttcctgtttactgggggttaggacttcaacatatgaattttgggaggatggaattcagccttgtcaggcatctgtgttggaggtggactgggtaggaaggactggtatgtggtgagccagtgataaagctcttttgtgcaagtccacttgttgagtgagggtggagacctgattgggagccgtcgtggacataatcaggaggcagcagatggggaaggtattcggaaggtggattccatgtcaataatgtggggaagaggaggttgtgatgctgggccatttctagcacggaccttttaagaggaggctggcggcttaaacgaacggcaggaatttagtagagggaataagtttggaggtcttaactaagaattcttagctactgtcaatgaattattgacaaataaatgggtataggtaaaatcctatgagtttagaatgtaacagacactctgattgcaaagtgatgagctccagctctatgtagcacccagcatgtgttgtttacgtgaaagtttgacattttttaatagtaatttcttatccgagaactcttcatcctgctaataaatgcttgcttctctatgtgcctgagaccttcagcacatgctttaaccaggccaaaataaagggaccaatacgtttcctaatatcctaaagaagacattggtgatagatatgatttcagaaacagggacatgtaggaaaataactgaaaggacttagatgcagttagagtgacccttttcccctcttaaacctcaatattgctatctgtgcattctcagcattgtaaggccaacctgtataacattacttgtgttatgtacttgttcttgagtcaatgccaggggaaaatggacctgggagagctcgctttcatagctcccaagcctgattaacttctaacgtgaaccctctaaagcttcccctttgagtcatcactgcagaatcaaagtctcccactttttcctcttccatcttcctttttgatgctgggtcatcaccagtgctatttttctctaaaatgcctgctggcatcttgagcctggcaccactaaacactaggtaagaggggcaaaggcaattaagatgggtgtggcagagtttctgcctttcaggagcctacaattatgtgaagggatgagacaaggacaggaggctaaaatgaaactcttgtctcagttttggctgaggcctcaagtcaataggtggcaaaaacaatggtgttccaaagtcagggtgtggtttccgatgcaggacttggaggtggttgaaaaccagctttgagggcccccagttgaccacccagctgcaacctatataccacatggagaggccgggagaggggttggagattaaagaaatgatttcttggaatagaaataatccttgtgtaaaaagttttgtcccttcatggaggcaggttgcatgctaccttcctccttcatgtctgtgagcatgggttcaaagacacctttcagagagcatattaggtgtccccagaaacttaggtaacttggggtactggaggctgatttcacaggtacagtctcaaggggcagaggctggccaaagtcacagagaagagagttatgtgcctgcccttccactggccacaggccaaagatacaagttcactgtggaccagaggtgggtcatatgagagagaaagccctgctagggttatcagataattcccagagcagtaggaagctagtggtattgctagatagccagggaccaagagagagctcttaagtggccatgtcgatggaatgattttgcctaagtcaagagcaggacagatgagaaatattcccagtgatgggggacaggagggagagccgagggaaagaattggtgttctacatgagccatggcctggggaaaaccaacatcagatgtgtgtttacctctgcccctccccctgtctaaccgtggagagggcagaaggtacagcctgtgaggtgagggaaagagacaagaagccaaccatgattcccaaggcaccagccagaaagaggcctaggttgacccagggaggggtgtggacttgaaaatagagatttggtgattctatgggctagatgtcatgaatgcatttttgtgagagtgagtagtaagccacagggaccacctgtgatttcttcccagaatggtgaaggactcagtctcacagagcaggtggagcaggccctttcaggggaaagaaaacatcattttctgattgtatcttgctatgatttgaatgtgtccccatatgttggaagcttaatctttaatgcaatagtgttagatacgttgcctaatggctgatgtttaggtcatgagggcttcatcttcatgaatggattaatgctgattataaaagggctcgagttattctctctctgtctttcaccctctccttgcctttctgccatgtgatgcgttctgccatgttatgacacagcaagaaggccctcacaagatgccagccccttgatcttggactttccagccgccagaactgtgagaaataaatctctgcttattataaattacccagtctcaggtattcccttacagaagcacaaaatggactaagacacacctagttaattcctcacattcaagttctagttatgtgcacaagcagtgataatctcaggcagaataatgtgcatggtcctcatcctctcaatgcatacctatcagacatctgctatgtgccaggcactgactggactctggagaacggcagggaataaaaccaggcaaggtatggacccttcacagagccgacagtttagtagagaagacactaggcctcctgagacaaagttatagtgtcttttgagaatttgacaggggaaaaattacaggggggtagagtgaaaagaggaaagctaagtagaagagtgatgcttggggctggatcacacagaagctgtcagacctgggtgggcagcgatggctggggtggggaggttattctagacagaatgactggtgttccgcgcctggggaaagagagtggtcagtttcatgagagcacacagtatatagaatgagtatgattcctcttatatgaaatagaatagaagaggcaaatctacagagacaggaagtagattagtggttgcctaaggttgaggggtggggagaaatgggaagtaaccaccaatgagtacagggcttctttttgcagtgataatatttttctaacttcagattgtggtgatggttgcagttaatatactaaagtcactgaattgtagactttcagtgagtgaattgctgtgtgaattatatctcaaataggctgagaaacaggggaaggagaatctagtcacagcaaaataaatgtggaatgatacagtcaatagaaaattcagaatttggcaacaccgagcaaatatgtcatttagagctacgtggtaggactctaagcaaatcgagacaatgattatgaacatgtcagggatgggttagcttgaggaggtgggaggggaatatgctaagtgagggagcagaggggaatggctaacaaactcgacatatttgatgatttactgtgagaggtggttttgcaggtgtggtctttagaacaataatttgtacaactcttaggaacgctcttttgaatgtatgacaggttttaaaataaagaaagaaaaaatggggaggacagtcagaaatatatatggagagggcgtgcagagttcagagttccaggcaagacattcgtgtttaacgaaggagacagggagccagcaaagatacttgagcaggcagccaaggggatgagagcagcaggctaggaagggatccaggctctgtatgcaacatgcatgggggcagggaggggccagtggtggggagaagccctaggagactggtgataggatctgggtatctcgtagggtagcagggatgggagtgctttgtgggaagtctgaggaccaccggcagaagggtaaagttgaagatgaaagatcaattatggcaccttgggcagagataggggttcaggaggagcagctggaataaacagaagatgaatagtttagtcttagacatgcaagaaatataagaaactgtggggagattgtaactataacttggcaaattgtaggttcccggataattacggggcctttataaattctttctgtgcttgtttccttgagaaatctgctctttattggtagtcctatctagagaactccatatccccctctgatctgcagtcctggctcccacaactttccagatagaagaacaatttctttctttctttctttcttttttcttcttttttttttttttgaaacggagtcttgctctgtcgcccaggctggaatgcaatggcgcgatctaggctcactgcaacctccacctcctgggttcaagtgattctcctgcctcagcctcctgaataggtgggattacaggcacccaccaccatgcccagcttggttttgtatttttactagagacagggtttcaccaggctggtctcgaactcctgacctccggtgatccacccgcctcggcctcccaaagtgctgggattacaggcgtgagccaccatgccggccatcctgttgcattttcaggggcttcgcctggggccctggcagtgcagacttgagagaatgctttcctgtttcccaactccaaaaattctccctgaatacattcttcctgaatgctctggctcctcatttcttgtctccctgggaaactagcctggctagtgtgtgagaagaattgaggcaaaggcctataggggaaagagactcttagataggacatcaaggatgaatggaagatgtcatccatactgggtgggaggagcaagtgtacagctgcccaagggagagacaggatgattgaagcaacaaggcagaatcccaagaggtaggaaaaggccatgttgttcaagcagtttggacttgaaccttcaccctaagtgtaactgaagctattgaaggctttgaagcagggtggtgatgtgatcggtttctacctgcatctaatgagcatttactgtgtgccaggagtcatttggtctttcatatacattatctctctctctttttttttgagacggagtctcactctgtcaccaggctggagtgcagtggtgcaatctcggttcactgcaacctctgcctcctgggttcaagtgattctcctgcctcaccctcccaaataactgggactataggtgtgcaccaccatgcccggctaatttttgtatttttagtagagacagggtatcaccatgttggccaggatggtcttgatctcttgaccttgtgatccgcctgcctcggcctcctaaagtgctgggattatgggcatgagccaccgctcccggctcatacattatctcatttaatattttcagtggttccatgggggtaggtgtcatccttctgtccatccatctcatagtttttaaaattaagggaccactttgtgccagtcactatatttacgttcattggacagatgaggaaactgaagagttctcactcccagagggtcaaatcaattcctaaaaggctgtaaccagaaagaggcacagccaggattcaaacccacaaaagcagattccagggcttgtccactgggcctgaggcatggttcagccaagccccctccctggggtggaggtgcaggtcctgggtggatcttaaaggcagcaaggtcagcaagagccagggtcctgaagtatgaactgatcttgggtaaaaagcgggggtcagtgaggccactacaggtgacatgcagaggataaaaggcacttgggaatgaacttggaaaacctgggcacctgctatttctctgctttctttcttgctaatggatctctgattttctttttcttggtggttggcttgaggggttgggagggtgggtagccatgtgtccagctcctatgaatgaattgtgattgcttttaagccagtcatggctatgccaataccatttgccaggtattcactttgccgctgtctcctcttgtagctaatgggagccattgcaccaaatttcgctcaatgagatgaaaaggaagtctgttgagggcttgtgaaaaatatttttgatccctgccatagaaggcagaaaagaggagatcctatgttatctggctgcctcactgtatgccgactttgaatgcagtcatgattcttggagctgtggcagccgtcttgtgaccatgaagcaataatcacaaagacaaaaaaccaacaaattaatggtggagactggaaaaagctagacacctaatgagcctgagaagttgaactaatggcagcaaattttccttccagacttcttagtatgtgaaaaaggtaaacttctaggagttcatgtgtttgcattatttctagctgaccatgtgccagctggtataataagcacagtggagatgaggtaggaaggaaaggtgaacctatttggagtgcagggtgatgtgttaggaacattgctttgttttctaattttttttttttgagacagagtcttgctgtgttttccaggctggagtgcagtggtgcgatcttggctcacagcaacctctgcctcccaggttcaagtgattctcctgcctcagcctcctgagtagctgggattataggtgcctgccaccatgcccagctaatttttttttgtatttttagtagagatggggttttgccatgttggccaggctgatctcgaactcctgacctcaggtgatccacccgcctcagcctcccaaattgttgagattacaggggtgagctactggtgccccgccttctaattgttttatgtgttgcacatcttgaagacagagtcaccttttcttttctgttttccccttcccacttatactctcctcacctcttcttttcctctaacccatattaagcccatatgctcaacaatcattttttttgaataaagaaatttcccctctttaattctcattgtacttctatgaagctatcaaaaatattcaagggcagagacctaaacttttccactgtgctcatgaggtcattacagatgctttgcttattttatttagcgccttgaaaggaagctggtaatttagaaacttagatggttctttgatgagaaaaatacctaaaggagaaaatgtcacaaaaaactttggggtggagaggagggcaggcataaaaataaaatgacaaagacaatggaagaacgggaaagggaggatgaaaagaagtcttttgtatcactggcatttcaggattttacaccagcagtctcttctatcaatgaagacatatttttgaggtctctaattataatggtttcctatggcagacactgttagttaccctgcaaacagctatctcccttattttacgtcaatagaatcccatttttaattatcctctagagtgtggcaatgttactcacatgaggatggtccttacagtggccccagacccagtgtagggaatcttatccttctccacccagggattggtttatgaatggtcatgtgacagaattttggccaatgagatgagaagggaatccataggggtcttatgggaaattttcctttgcttttcaaagaaggcagcaagctcctttttcagcttctggtgtgcataggtgaggaggtgatgcctggaactatgacagcctttatttatttatttatttatttattatttaagttctagggtacatgtgcacaacatgcaggtttgttacatatgtatacatgccatgttggtgtgctgcacccattaactcgtcatttacattaggtatatctcctaatgctttcgctcccccctccccccaccccacgacaggccccagtgtgcaatgttctcctttctgtgtccaagtgttctcattgttcaattcccacctatgagtgagaacatgcggtgtttggttttttgttcttgtgatagtttgctgagaatgatggtttccagcttcatccatgtccctacaaaggacatgaactcatccttttttatggctgcatagtattccatggtgtatatgtgccatattttcttaatccagtctatcattgttggacatttgggttgattccaagtctttgcttttgtgaatagtgccacaataaacatatgtgtgcatgtgtctttatagcagcatgatttataatcctttgggtatatacccagtaaagggatggctgggtcaaatggtatttctagttgtagatccttgaggaatcaccccactgtcttccagaatggttgaactagtttacagtccgtcccactaacagtgtaaaagtgttcctatttctccacatcctctccagcacctgttgtttcctgactttttaatgattgccattctaactgatgtgagatggtatctcattgtggttttgatttgcatttctctgatggccaatgatgatgagcattttttcatgtgtctgctggctgcataaatgtcttcttttgagaagcgtctgttcatatcctttgcccactttctgatggggttgtttgtttttttcttgtaaatttgtttgagttctttgtagattctggatattagccctttgtcagataagtggattgcaaaaattttctcccattctgtaggttgcctgttcactctgatggtagtttcttttgctgtgcagaagctctttagtttaattagatccaatttgtctattttggcttttgttgccattgcttttggtgttttagacatgaagtccttgctcatgcctatgtcctgaattgtattgcctaggttttcttctagggtttttatggttttaggtctaacatgtaagtctttcatccatcttgaattaatttttgtataaggtgtaaggaagggatccagtttcagctttctacatatggctagccagttttcccagcaccatttatcaaatagggaatcctttccccgtttcttgtttttgtcaggtttgtcaaagatcagatggttgtagatatgcggcattatttctgaggactctgttctgttccattgatctatatctctgttttggtaccagtaccatgctgttttggttactgtagccttgtagtatagtttgaagtcaggtagcgtgatgcttctggctttgttcttttggcttaggattgacttggtgatgcgggctcttttttggttccatatgaactttgaagtagttttttccaattctgtgaagaaagtcattggtagcttgatggggatggcattgaatctataaattaccttgggcagtatggccattttcacgatattgattcttcctacccgtgagcatggaatgttcttccatttgtttgtatcctcttttatttcattgagcagtggtttgtagttctccttgaaaaggtccttcacatcccttgtaagttggattcctaggtattttattctctttgaagcaattgtgaatgggagttcactcatgatttggctctctgtttgttattggtgtataagaatgcttgtgatttttgtacattgattttgtatcctgagactttgctgaagttgcttatcagcttaaggagattttgggctgagacaatggggttttctagatatacaatcatgtcatctgcaaacagggacaatttgacttcctcttttcctaattgaataccctttatttccttctcctgcctaattgccctggctagaacttccaacactatgttgaatgggagtggtgagagagggcattcctgtggtgtgccagttttcaaagggaatgcttccagtttttgcccattcagtatgatattggctgtgggtttgtcatagatagctcttattattttgagatacgtcccatcaatacctaatttattaagagtttttagcatgaagggttgttgaattttgtcaaaggccttttctgcatctattgagataatcatgtggtttttgtctttggttctgtttatatgctggattacatttattgatttgcatatgttgaaccagccttgcatcccagggatgaagcccacttgatcatggtggataagctttttgatgtgctgctggattcggtttgccagtattttattgaggatttttgcataaatgttcatcaaggatattggtctaaaattctcttttttgattgtgtctctgccaggctttggtatcaggatgatgctggcctcataaaatgagttagggaggattccctctttttctattgattggaaaagattcagaaggaatggtaccagctcctccttgtacctctggtagaattcagctgtgaatccatctggtcctggacttttttcgttggtaggctattaattattgcctcaatttcagagcctgttattggtctattcagggattcaacttcttcctggtttagtgttgggagggtgtatgtgtctaggaatttatccatttcttctagattttctagtttatttgtgtagaggtgtttatagtattctctgatggtagtttgtatttctgtgggattggtggtgatatcccctttatcatttttgattgtgtctatttgattcttctctcttttcttcttcattagtcttgctagtagtctatcaattttgttgatcttttcaaaaaaccagctcctggattcattgattttttgaagggttttttgtgtctctatctccttcagttcttctctgatcttagttatttcttccttctgctagcttttgaatgcgtttgctctcgcttctctagttcttttaattgtgatgttagggtgtcaattttagatctttcctgctttctcttgtgggcatttagtgctataaatttccctctacacactgctttaaatgtgccccagagattctggtatgttgtgtctttgttctcattggtttcaaagaacatatttatttctgccttcatttctttatgtacccagtagtcattcaggagcaggttgttcagtttccatgtagttgagtggttttgactgagtttcttagtcctgagttccagtttgattgcaatgtggtctgagagacagtttattataatttctgttcttttacatttgctgaggagtgctttccttccaactatgtggtcaattttggaataagtgtgatgtgatgctgagaagaatgtatattctgttgatttggggtggagaattctgtaaatatctattaggtccgcttagtgcagagctgagttcaactcctggatatccttgttaactttctgtcttgttgatctgtctaatgttgacagtggggtgttaaagtctcccattattattgtgtgggagtctaagtgtctttgtagatctctaaggacttgctttatgaaactgggtgctcctgtattgggtgcgtatatatttaagatagctagctcttcttgttgaattgatccctttaccattatgtaatggccttctttgtctcttttgatctttgttggtttaaagtctgttttatccgagactaggattgcaacccctgcctttttttgttttccatttgcttggtagatcttgcgccatccctttattttaagcctatgtgtgtctctgcacgtgacgtgggtctcctgaatacagcatgctgatgggtcttgactctttatccaatttgccagtctgtgtcttttaattggagcatttagcccatttacatttaaggttaatattgttatgtgtgaatttgatcctgtcattatgatgttagctggttattttgctcgttagttgatgcagtttcttcctagcattggtggtctttacaatttggcatgtttttgcagtggctgataccggttgttcctttccatgtttagtgcttccttcaggagctcttgtagggcagggctggtggtgacaaaatctcagcatttgcttgtctgtaaaggattttatttctccttcacttatgaagcttagtttggctggatatgaaattctgggttgaaaattcttttctttaagaatgttgaatattggcccccactctcttctggcttgtagagtttctgccaagagatccactgttagtctgatgggcttccctttgtgggtaacctgacctttctctggctgccgttaacatttgttccttcatttcaaatttggtgaatctgacaattatgtgtcttggagttgctcttctcgaggagtatctttgtggcattctctgtatttcctgaatttgaatgttggcctgccttgctagattggggaagttctcctggataatatcctgcagagtgatttccaacttggttccattctccccatcactttcaggtacaccaatcagatgtagatttggtgttttcacatagtcccatatttcttggaggctttgttcatttctttttactcttttttctctaaatttctcttctcgcttcatttcattcatttgatgttcaatcactgataccctttcttccagttgatcgaatcagctactgaagcttgtgcattcgtctcatagttctcgtgcgatggttttcagctccatcaggtcatttaaggacttctctacactggttattctagttagccattcgtctaatcttttttcaaggtttttagcttctttgtgttgggtttgaacttcctcctttagctcagagaagtttgatcatctgaaatcttcttctctcaactcgtcaaaggcattctccatccagctttgttccattgctggcgaggagctgtgttcctttggagggggagaggtgctctgatttttagaattttcagcttttctgctctgttttttccacatctttgtggttttatctacctttggtctttgatgatggtgatgtacagatggggttttggtgtagatgtcctttctgttttttcgttttccttctaacagtcaggaccctcagctgcaggtctgttggagtttgctggaggtccactccagatcctgtttgcctgggtatcagcagtggaggctgcagaacagcgaatattgctgaacagcaaatgttgctgcctgatcattcctctggaagcttcatctcagaggggtacctggctgtgtgaggtgtcagtctgcccctactggggggtgcctcccagttaggctactcgggggtcagagacccagttgaggaggcagtctgtccattctcagatctcaaactctgtgctgggataaccactactctcttcaaagctgtcagacagggacatttaagtctgcagaggtttctcctgccttttgttcagctatgccctgcccccagaggtggagtctacagaggcaggcaggcctccctgagctgcggtgggctccacccagttcgagcttcctggctgctttgtttacctactcaagcctcagcaatggcaggtgcccctcctccagcctcgctgctgccttgcagtttgatctcagactgctgtgctagcaatgagcgaggctccgtgggcatgggaccctctgagccaggcgcaggatataatctcctagtgtgctgtttgctaagaccattggaaaagcacagtattagggtgggagtgacctgattttccaggtgccatctgccacagcttcccttggctaggaaagggaattccctgaccccttgcgcttcccaggtgaggcgatgcctcgccctgctttggctcacacttggtgcgctgcacccactgtcctgccccgactgtccaatgagccccagtgagatgaacccagtacctcagttggaaatgcagaaatcacccgtcttctgcatcgctcacgctgggagctgtagactggagctgttcctattcagccatcttggaacccaccacctgtggcagccttttaggggccatgagagatgcccgcccaaaaggataagccaacacactgaagctagtgaaaaagaaaaacaaaaataatcttgaaccttaacttagtttaacctccgtattaacaaactctggttatatctgttaatactgatgtaaataaatgattaaataaataaatgaagaataaaaaaactcctgtgcagaataatctcaagtaatttatatagctactctgtcctcaaggagatagaatgtacccccgcactcccgaagtgtggactacacataatggcttttttctgataagtacactgggtggagagaagggtcactgtacagtagagaaggctgacaaacaccgcctcagttggtgatcacagttaatgtcaacagtgataagtcatgttgatagcatgtacctcttacataatgtaatgagaatggcactttctctctggtcttgtctgatctttcccaaacccacaactctgtctaattcatgagacaaacatcagacgaacccaagttgaaatatgttctaaacaaaatttcttgtcagtattcctcaaaactatcaaggaaaatttgagaaactgtgacaagaggcacccaaggagaaatggttactaactgtaatgtggcatcctagatgaaatcctggaggagaaataggacataaggtgaaaagaaagaaaatctgaataaagtatggactttaatgaacaatagtgcatcaatactggttcattaattatgacaaatttaccatactaatgaaagatgttaataatagggcaaagtgggcctgggatttatcagaattttctgtaaatctaaaactattttaatattaaaagtttattttaaaaatagagacaccgatatcaagaatgaaaggtccaattctaacaaaaggtccaactccagattctatagacattaaaaggataatattagtaacaactttgtgccaatatatttgataacaaatgaaaaaaaattgttaaaagacacaaagctcactgaggaataaataggtaacttaaaaattcccgtatctcttaagagcattaatatctagttaaaaattttcgccgggcgcagtggttcacgcctgtaatcccagcactttgggaggctgaggcgggtggatcatgagttcaggagatcgagaccatcctggctaacatggtgaaaccccgtctctactaaaaaaaaaaatacaaaaaattagccgagcgtggcggtgggcacctgtagtcccagctactcgggaggctgagacaggagaatggcatgaactcaggaggcggagcttgcagtgagccaagatcgccactgcactccagcctgggtgacaaagcaagactctgtctcaaaaaaaaaaaaaaaattcccacaaagaaaactcaaggcccagttagttctattgggaaattctgccaaacaattaagggaaaaattaaaccaattctacacaaaatcttcctaaaaatggaagagaaaggtatacttccggactgtctttgttatacaatggaatagtatttagccataaaaagagtgaacttctgtcatttgcagcagcatggatgaaactggagatcattatgttaactgaataaaccaggcacagaaagacaattattgcatattctcactcataaatgggagctaaaaaagtggacctcatggatgtaggtagtagaacgatggttaccagaagctgggaagcatcagtgggatgggtcagaggcatgcagagaggttggttattgggtacaaacataacagttagataggaggaataagttctattgtttgatagcacagtagggtgactacaattaacaatgatttattgtatatttcaaaacagctggaggagttgaaatgctgtcagcacaaagaaatgataaatgtgtgaggcgatggatatcctaattactctgagttgattattatagatggtatgcacatatctaagtatcacatgtactctataaatatgtacaattattatatatcaattaaaaaatagaactactatatgatccagcaatcctatttctggatatatacccaaaagacataaaaatatcaaagagatatctgcactcccatattcataattgacaagatatggaatcaatttgtgtccaccgatggatgaatgataaaggcaatgtggatagaatactattcagccttaaaaaagaagaaactcctgtcatttgtaacaatatgcatggacccggagaaccttatgccaggaaaaataagccaggcatagaaaaacaaatgtttcttgatctcacttatacgtgggatctaaacatgttgaactcatagaagcaaagaatggaatgtggttgtcagtggcctggcaggttatgggagatgggaattgggagatgttggtcaaagtgtccaaggttcagttagacagaatgaataagctctgctactatatagtatgatgattacagttaataataatgcattgcatacttgaaaattcctatgagagtgtaacttaatgttcttaccacaaaaaataataagtatgtgaggtgatggatctgttaattagctcaatttaataattttgcaatgtatacatatatcaaaacatcacgttatacaccacagatatatacaattttatttgtcagttgtaactcataaaaataaagattctagaacgaatatatgggtctagcaaggttgcaggatttaagattaaaaatcatagtatttttatatactagcaacaaacaatcagacattgaaactttaaaatacaccatttacattttatcaaaaatatgaaatactttgaggtaaagatgtgaaagacctattattgaaaactgcgtaacattgccaaaacaaattaaggaagacctaagtaaatggggaaatataccatgtttacggattgaaagactcaatattgttaggatgctaattatctccaaattaatctacagtttcaatgcaattttaatcaaaattgcagcaggcttttggggggttgggtaaaaattgataaactgtgttaaaattcacatggaaatgcaaagaccccagaacaacaactttgaaaaataagaacaaagttggaggacttacaccacctgacttcaaacttattataaagttatagtaacaaagacacagtgcagtattagcacaaagagagacaaatagataaagggaatacacttgggtccagaattagtcctcatgtatataggcaaagatttttgacaaaggtacaaaggcagttcagtcaagaaaggatagtcttttcaacagatgatgttggaataattgaacatatacctgcaaaaagttaacttcaaccaatacctcataacatgtacaaaaataactcaaactgggttatagacctgaatataaagtgtaaaattataaaacttttagactaaaacgtaagagaaaatctttgtgacattgagtaacgtaaaaatttgttagatacaaaccaaaagtataatccataaaagaaaaaaattgttaaattggactgcatcaaaattaagaacttttgctcttcataagtccctctaagagaataagaaaacaaaccaaagacagagaaaaactattattttccaatcacatatctgataatggacttgtgtatggaatatataaataatgctcaaaattcaataataagaaaataaacaatcctaatttttatttttatctttaaaaatttttttttgagaaagagtctagctctgttgcccaggctggagtgcagtggtgtgttttcactgcaacctccgcctcctgagttcaagcaattctcctgcctcagccttccaagtagctgggattacaggcactcgccatcatgcctggttaatttttgtatttttgtagagatggggtttcactatgttggccaggctggtcttgaacttctgacctcaggtgatctgcctgcctcagtcttccaaagtgctgggattacaggcgtgagccacaatcctaatgtttaaatgggcaaaagatttgaacagacagttcaccagaaagatatacggatatatggataagcacgtgagaagatgctcaacatctttagtcattaaggaaatgcaaattaaaaccagtatgaggtaccattacacacttattacaatggctaaaattaaagagacctgtcatgccaagtgatgatgttgtgaagcagctgaaactcatatgcactactgtggaaatgtcaaatggtgcaactactttggaaaacagtttggcagtttcttaaaagttaaaaatatctctaccaccagtcattccagccttacacatttacccaaaagagatgaaagcatgtgtccatacaaagacttgaatatgaatattaatgtcagctgtatttgtaatagacctaaactgtaaacaactgaaaggtccatgaacagataaatggataaacaaattgtgtatagtcatacattagaatattactgcacaataaaaagaaaaggaaaggagtattgaattgatgcatgcaacaacatggatgaatctctaaataactatgtaagtgacagaagccagctgaaatagtacatactgactgctactaatttttataaaattctagaaaggctaatctatgttgacagaaggctctttaatggattgagtgggatgggatggagagagaaaaggaggcacacagaaaatttggaggtaatgaatgtattcattatccatgattgcttctggtgctattttcatgtatggttacatatgtcaacatgtcaaattacacactttaaatatatacagtgcattgtattataactcagtaccattctgttgttgggaaataatcataggtaccataaaaatttacttgtaaggatggtcatagcagaaatatttatactagcatgaaaaaaatcagagcagatcaaacacccaataataaaaggatataaagtatttgtctatcataaaaataagtattatgtatttagataatatgagatttgtgatgaacttctgcggatacaggagaaggcacacaacatgttaatgaagaaaagcaggttataaaaccttgaaatggaatcccaatttaaccaccttctccccctcacacccacctgtagataaaattcttgaaggaaatgtactacgttgtctataggcagtaatattatgcgtggctcttatattcttatttgttcttttatctcctcctattttccaaatctttttttaaaaaaacacacaattaacatttttacccaggaaataacactttttttttttaaagacaaagaattacccagattggtgacaatattgactcaaaaccatcaactggatgtttgctcctgtctacggctgggttcctgcttgttcattatgtctgccgtaggttacatttttggtcacagtgatttgttccctctctgtaggtggaggatgtaggcattcttagccatgtgacttgctttagctagcacaatgttagcaaacatgatggaggccacactggagcaaaatgcttcagatgttgttgtctggtttggcttggccacttccttctgcaagagaaaggcaagatgtcttctcagaattgttagcttaaaaattacacaatgtggccaggcgtggtggctcatgcctgtaattccagcactctgggaggctgaggcaggcagatcatctgaggtcaggagttcgagaccagcctggccaacatggtgaaacccccgtctctattaaagatacaaaaaattagatgggagtggtggcacatccctgtaatcccagctacttgggaggctgaggtaggaggatcgcttgaacctggaaggcggaggttgcagtgagctgagattgtaccactgcactccagcctgggcaacagagtgagactctatctcaaaacaaacaaacaaacaagacaaaataattacataatttgtatatttagaaaaaggagagcattatttcatatcaaggtcatatcctacaaggtggccgttctcacaggttggagagaggagtctcctgttgaagctattagcaggaacttcaaggaaaagagaggaaagacaggagtgtaagctgaataggttgggcttatatacatattcaacaggatataggaggagctatgaatattcatgaaagggggttgtacacatgcatgacaagcacacatgtgttccaagtgacccatgttcactttggggtggagactcaacatttccatgtatgactgttaggccctgtatgtcaaaaggtgaagtgggcactcagtgtgcagcctctgtaaactggctggaaccagtccatacacagcggtcgtcttatcaggagaaagttattgaaatctgtcccttgtccactcaaagctgtagttacggcttgtggaacagggggttatttagtcagcatctagaggaggatgagctgtaattgttttaatattgcttatctaaataagccagtgcttatttaactgctaaagacaaagaaaaaccttgtggtagttagaacatgctgtattctttaagtggaggctatgtgacttaaccttgcctctcatggccttaggttctgtttacaaattggcatcccattgccacaaatagtctgttcttatgtcttatcatctatattttaacataattgactgtcagcattgtgtctaaactgaaaaaggggctgcgtgtggtggctcacgcctataatcccccagcacgttgggaggctgaggcaggggaattgcttgagctcaggaacttgagaccagcctgagcaacatagcaagaccccatctctacaaaaaaatttaaaaattagctgggcatggtggtgcacacttgtagcccagctacttggaaagctgagagaggagaattgctggagccccagagctagaggctgcagtgagctatgattgtgccactgcagtccagcctgggtggaagagtgagaccctgtttcaaaccacaagaacaacgacaacaaaactgtaaaaggtaaggggcatcatgaggcatgtctgacctcccatcccatcatggctaagaactcagtttttaaggtttcttggccaaagggggatccattaagttggttggaaggcttaggattttatttctggcttacagaatgaaggggttgttccttaaccttggggcccaaagtgaaaagatatacagaggcaacctgaagacattctgacccctggagcaaagccacagctgacctgctgccttcatgtaaccaaaacgagaaattgaggtttgatgtggaagcctctgagattttagaattgcttgtaatccagcaatacatttttctattatagatgataacatctcataaggcatagcacagcagtgtgtttactacaaaatcttgaatctgggttaagagcatgccctaggttccatgccgtggggtaaaggtgaatgggtgaatgggtgaggacttaggggtggtgttaaaaaattcaggaagatgcctctaaaaggcactattatgggagaaggcaaatattatgggaaatggggtagtaggatgagagaatggggtgagatggtagagatggaaaaaagcgcatgggaaaggcataatgcaaacttgcatgcaggcctggacaagatggagaaagaggggaagatgcagaggaaggaaggcccatgtagttcaagaatagtgcagaaatgcttttctcagccaccactagtgtcctttctcttcttaaaaatgatgctggcattacttctttctcaagtgcacttctcacctcatttccttagctaggaagtggaaagtactccaatgtgggttttgatgaaagtgtctgcggccccagctgctggatgcaccatgctgcccgtatttcttcctttccaaacaagggcttccttttagattgtgatatggtttggctgtgtccccacccaaaactcatcttgacttatagctcccataattcccacgtgttgtgggagggacccagtgggaggtaattaaatcatgggggtgggttattcccatgctgttctcatgatagtgaataagtctctcgagatctgatggttttataaggggaaacctctttcacttggctctcattctgtcttgtctgctgccatgtaagacgtgcctttcgcctttcaccttccaccatgattgtgaggcctccccagtcacatggaactgtgagtccattaaacctctttttacttacagattacatagcctcagtatgcctttatcagcagtgtgaaaacaaactaatacaggttgtcttgtgtacatggctttttctgggcacttgcatttgaattttccttttttcttaacctaggggtttccaaatcttgggtctactctttcctcttctatgtacataatttctcacagggaatataccagcatcttcagctttgtatacaacacctttcttccttccttggggagagtgaataatttgatgtcatcaacccaagacacttcattgaacatggagatgtaggtggcaataatttaaattcatacctaataaccagcttgccttttttatactttaaagactttttttccaaaagaaaaaaatctaattatgcacaagagcaattcactcagaattaattcactaggaattaaattgaaaaaaaaaggtaaggatgttaacaatcctttaaaaaataattcaaattagaaacactaattataggaactcctttatataacatgaaacacagttctctgaggcatggtgaagagggctggctgtaaagcaaactctcagagaacaaagtttctgatttatggaggaatttgtttgaacaaggaatgcaatttcctttgaggagttactgctcagatctgtgatcactgtctgatcgtttctggggagaccacaggacatagcatgaccgacattttattctgggatcagagcctaagggctcaccatcttgaacttaggaagtcagaaaggaaagaagtcaaatgtttgggtggcccctctaatcacagccttcagctttctcgcagaacaggagcacgcagcgggtgataagagtgagatttctgtctgggggtgtctcacccaaagcttttgttctttgcatttcagcaagttttcttgaggacaggcaaggattgggatctgagggccatttttctgactccttattaaggttttatttgggcctggcgcaggcccaaataaaggtcaggagttgaagaccagcttgggcaacgtggtgaaacccatctccactaaaaatacaaaaattagccaggtgcggtggtgcacatctgtaatctcagctacttgagaggctgaggcatgagaatcgcttgaacctgggaggtagaggttgcagtgagctgagatcacgccactgccctccagcctgggtgatagagcgagactccaactcaagaaacaaaaaaggttatatttgccaattactaagccaaagggcacaatcaaagtgataaatagtgcttttcaaactattgggttgtgtcccagtttttggattgtgaaatcaaattagcacaactgaatatgtaattttgaaaaacagaatagaatagaaaatgccagactgcattggatacatgcataaggagtgctatgggctgaatcatatccccacaaattcatatgttggagtcctaacccccggtagctcagaatatgaccttatttggagatagagttttttaaagaggtaattaaggtcaaataaggttattagggtggaccctattccaatataactggtatctttataagaaagggagattaagacacaaacgcccactgagggaagaccatgtgaggacacagggagaagacaaccatctacaatccaaggaaagaggcttcagaaggaaccacccttgctgacaccttgatcttggacttctggcctccagaactgtgagacaataactttctgttgtttgagccacctggtctgtgatgctttgttatggaagcctgagcaaactaatacaaggggtaagtattattttgtggaaacttaattttgattttacatacacacatatacacacactcatgcacacacacacattcttaagatttatagcctaaaatgattgaaaaatactgggtgggagtgagcccacaatgtttccatattcagggagcaaccagagagatggtttgcactcatccaggtgaggacagtgaagacaggaagtaaactctcaccatcagagcaagcaagggctgcctgtttatccctcagtagaaagagaagccttgacttggcagagggaaatctcctatccccgtatgtgaaattcagtgtttcctgtttcgccagggccaaaaaaaaaaaaaaaaaaaaaattgtgtgttagagcaacaatctctaaatgaaaattattcatattgatttttaaaaggggagcaacttattacacagtgaattccagttccatttggaattcacccaagagcctagaagaaagcaagaaagtttacgagtcagtgagcctaagtgtcttaaaattcatgccctgaagttcacctttattcgcaggaaaactcctctggctctcattcagtctctttattcttattttagaccctaatagtttaaaaagaagtattattttaaatttaaaacatgtgaaaagctattgtatttgttggccaaaatccggggtggagtctttcctttaattccagtgaattcttggggatgggataaatgttgtaggatgtctgcagacatagattcttcaaagagtcattttgctctctctttattttcattcagaaattataatacatcttttagtctgggcgcggtggcttacgcctgttatcccagcactttgggaggccgaggcgggcggatcacttgaggtccagagttcgagaccagcctggctagcatggtgaaaccccatttctagcaaaaataaaaaaattagcagggtgtggtggcatgtgcctgtaatcccagctattcaggaggctgaggaaggagaattgcctgaacctgagaggcggaggttgcagtgagctgagatcatgacattgcactccagcctgggcggcaagagtgaaattccatctcagaaaaatacatcttttagctataatcacacagatctgtgctctgttggtgagatcatttatgcttgcatgagtctaagcaacacaagagccaccaacttgtaggggaccctgaaactgggatctgctcaggaggggaaagtgctggaactttcagggcctctcttggggcaaatgtgactgacagctacagcatttaatcacatctccatgactaggcctgcccctttttggtctttgggatagatttcttgcacaggctttgcaagcctctatgtgttgaatttcttgcagtgctgtggaatttctctctctgaaccaggtatgtgcggttcttattccttaaatacaacatctgtctgtgttaatttgttcttttgtccccccagaatgagaagggggaattataaatggtgaggagaagtagcactaggcttttaaaggggaatttggcccagcgtctctcagaataaacaaccagaattctagcatcctcattctaccatattaatttgacatatttcacacataccgagcagtctgattccctagttcacagcagactggaacagtaaattggaaaatcgagcatgctgacaagagcaaagacaacagctactggaataatcagaagagtgacgaccaaaatattacagctagacttaacaacctgagaaggcatctcctggggccatttagtgcaggaagaacccaccctgcatacctcggtagccactgagggcacgatggtgtttcagacccaatgacacctttgagtaatcaagaaggaaagccatgacgccactgagtaatgccaaagactctctacttggccaaacttcagtcaggctcctccaagtcctcttttcaactaggcttcggccttggccactgttcttgccaggcctgcctagctcagttgtagcaagaatcccgctaagtccatttagacagagtccccctacccttgctatcttaccaccctgggctgccttcagcaagcatcctgttaagtcagtttagagagtcctcatacccctgatgtctcctcgtagtaatttcccttccactgaccttctcccctgctcactggctataaatccccagatgtctttgctatatttggtgatgagcctaatctccttcctctattgcagtagttttgacacaaattgcaataatcccaaataaagtcttccttaccattttaacaagtgtcagaataatttttttcttcagtagtaatcaagaacataaactcattgcagtagtttcaatgcagatgtttcagctatttgctgtcccagttccaggaaatttaggcactagctcctgcccattttcctcaggatagcacaaacctgaaagaagagctaagataattattattttacttggtttttccaaaggcaagggtgtgtaagttgttgacaagagtccccagttgaacctagcccacacctgtttggcttgtgtcttgctcttgtgtagagctgtgtccccagaagggatgccttttttttaatctttgcagaagcactatcagttcaccaaagtgtgcacctgttgggcccattcccctgcagggttgcatttaaacaccagttcaagatgtgttttggaaaaatagtcaaaacacaaaggaatgggtaagacagggcaaaagattaatttgctcaaacacattcagtatcaaatcgactgtaactaaaagaacaataactatctgcaagttgagtcatctacctgcagggcagtgcttctcaaatctcagtgtgcatcagaatcacctggaggggcagattcctaggttaaacctcagctttcactgaattcagttgcactagactggggccctgggatctgtgttttaaataagtacttatgtgatttaggtgttcgaggctcttggaccacactttggaaatcactgtctggaaagactgtgggatccacttagggaaaaaaaaacctctgctcttttggtctatgggaataccctagtaggcagattttggttgtccacctctgtggctagagtttggaagaagtgatgtgagcaaagacagtactgcattgttatgtgtgatcaagcaataagaatctagaattgctagaacttcttcttcttcttcctcttcttctcctccttcttctttcttcgacaaggtcttgctctgctacccaggctggaggcagtggcatgatcatagctcattgcagccttgaactcctgggctcaagtgattctcctgccccggtctctctaagtgttgggattataggcatgagccattatgcccagcctagaagcttcttaaaagtggaagaggctctctcatgagagaggaggagcccagtgaactggtaggaggccagagccaggggaaaagatgggctgagaaaagttcccagtggtgggagtaaacaagaaacttttcagaactgtgatgttgcctatttaagttgtttgccattataaatcataatgcccttcaatggccctccaatccccagtaaatctgttatacaaactggtcttggaccagaagtgggtgaggaggtgatgggtctgcggagagggtgcacagagagggaactgagagccttagttgggaggcaggaaggcagggaagctggctgaagcaagccccagtcaaagtggggagcaacacacccacaccctctttctcgccagaggtactaaagcagtggtgtcttaccatttctgctcaggcacctctatcagtaaagaaaaattttggacatggacactatattccattgtatggaattgattgattctacattaagtttgctcaatgcaaggatcatgaggatgaagacctttatgatgacccacttccacttgatgagtagtaaatatatgttctctttcttttgatttccataacattttcttttctctaacttactttattttaagaatacagtgtctaatacatagaacatacaaaattagtattaaccaactgcttattttattggtaaggctttcagtcaacataggctactggtagtgaagtttttggggagtgaaagttatacacagattttagactgcacgacggggtcagccctcctaacctccacattattcaaggatgaaccttataactatataacacatataatatgcatgctactgtactaatgtattattgacattacaaaaaatagggtaaaaataagaaatcagcataaaagttctaataatgtacttttgtactccagtcaactgagttgagtagccatggagcacatgggctctacatagaaaagcctgatcttatcctaagcgaactaacacagccacagaaaaccaaatactgcatgttctcagctataagtgggagctaaacattgagaacacgtggacacaaagaagggacaacagacaccggggcctgtttgagggtggaaagtgggaggagagagaagataaaaaaactacctgcttggtactatgcgtcttaccaggtgatgcaataatctgtacacaaaaccccagtggtatgcaatttacctatacaacaaacctgcacctactaggcacatgtaccctgaacctaaaataaaagttaaaaaaaccataaacacattaattaattaattaattaattaagaagaaaataggggaaggacagcccttactgttatatgaatagggcctgtttagtcagcagacacttggattactcagctacccaaactgagaagggttccatgattagactcaattttggggtcaaaccatggtgctttttgtgcttctcaaacattggtctgtagatcttctgtcagaaagaaagcccatgagaaatatacctcaatgataactaatcatgctcatgaattaaaagggagggaaaaaccccagtaacttcctcagggcagcaaccttaagacactccattcttgtagctaagcattagctcggagctcttgatcaggaatccttggattctcatgaagacaagagcaggacatcaagagaggtggctgatatggttaggctttgtgttctataggctttgtgttcccagccaaatctcatcttgaattgtaatccccaggtgttgagagaccccaggtgggaagtggctggatcatggaggtggcttccacgctgctgttctcgtgatagtgagggagatctcatgaaatgtgatggttttataaatgccagtttcccctgggctcttctgtctttcctgccaccttgtgaagaagttacttgcttctcctttgccttccgccatgattgtaagtttcctgaggtctccccagccatgtggaactgtgagtcaattaaacctcttttgtttataaattacccagtttcagatactatctctatagcagtgcaagaatggactaatacagtgcccacaccgaaaggttggaggtgataccttttaccagggctctgggtcccagcttttggggaccttgcttttgtttgtttgcttatatttattttattgcggtaaaatatatataacataaaattatccattttaaccattttaaagtgtcgttaagtgcactcacaatgttgtgcaactgttacactatctatctggttctaaaactttttcatcaccttaaacagaacttcttaaacagaaatacggaagttctttttgtgtctggcttatttcactcagcgtaatgttttcaaggttcgattatgttgtagcatgtgtcagaacttcattcctttctttggctcaataatatttcattgtatgaataaaccatatcgtgtttatccattcatctgttgatgaacacgggttgtttcttctaccttttgactattatgaataatgctgcaatgaccactggtgtacacgtatctggttgagtcactgttgccacttcttttgggtaaggaatgggattgctgtgtcatatggtaattctatgtttagttttttgaggaaccactaaactgttttccacaaagactgcaccattttacatccctaccagtaagtatgaaagttccagtttctttacctgctctacaatatttgttcatttcaatttttaaaaatggcagccatcctattaggtgtgaagtggtatctcattgtggttttagtgcgcatttccctaatgactaatgacactgagcatcttttatgtgcttattaaccatttatgtaacttctttggagaaatgtatattcaagtcctttgcacgtgttttaattcagttgtttgtctttttgttgttgacttacaggatttctttatatagtctggatactaaacccttgtgagataagtaatttgcaaatattttctcccattctgttggctgtcttttcactttcttgataatgttctttgatgaacaaaagtttcaaattttgatcaagtctagtttatttatattttcttttgtggcttgtgtttctggtgccatatctaagatgccattgccaaattcaagggctcagaaatgtacctttatatttcctttgaggagttttattgttttagctgttatatttaggtcattgatctattttgagttagcttttttatatggtgtaagataagggtccaacttcaattcattcttttacatgtgaaaattcagttgtcccagcaccatctgttgaagagactgttattttcctattgaatggtcttggcatccttgtcaaaaatcaattggccatatatgcatggatttatttttggactcttaattcttttccattggtctatatgtctacccttatgccagtaccacattgctttgattacttttgttttagaagtaagttttgaaattgggacttgagccctctgattttgttcttttttttttcaagattattttagctatccagagcccccttggaattccatataaatgtgaggatcagtttttctatttttgcaaaacagtttgttgcaattttgacagggactgcttggaatctgtagatcactttgggtacaactctgtttttttttttttttcctggactattagaattattgggaaggcttcttacctggttccagaggtgctaaccttgaatctccttagccaggaggcttaataacttctcaacactctgtacatggtgaggttggagcagggaaatcagtcagaatgttcattgcctatcttttctcccagagctggctgaacacaacattcaaaataccaacacatctctcttgcatttgttccagcctggagaccacactttagaacccactgtcttagtgggttgatgaatcagcatccaattgaggaactgaaattggaccagctgggtgtttagaggctcagttggaaagcagacactgaactagctcttagatttccagtaagttttccccttttgttaatgtactttatcacttttgtagttaaatatattttgcagctcatatatatacacacatatatatatgtgtgtgtgtgtatatatatatagcctatatatacatatatatgtatatataggctatatatatatataggctaggaatgcattcagttgcatgtaacagaagatttattttttcacacaacgagaagtccaaaggtaggtggctcttggcattagttcaggcactcaaagatctcagggctggcatccttgcagtactttttgtctttctctcacgatctcaagatggcttcaccacgccaaatatcacatctacattcataacaggaaagggtgggagaagcaccccagagcttatattgagaagacagaagctttccaggaagccctagaagactttccattatcttttgttaattagaattgtatcccatggctctctgtaggtgaaaaggaactggaaccttagggaataggattgtcatgattggctttaaccaatcctgatccattgcctgaagctgagcacattaccttcctaaataaaattggaattttgttggcaaggaataaggagcagcaagatatcagtgtactgcttaggtatatacacttatatggttattttattatctattttcttaagcagtttctacctctgagggcctgttctcatccctgctattctaagaatatagaataaccagaaattgtctcgtcctatctatttttccatttgggcctggatggtggcttggtgcctggtgaagtagagatggcaggatgtggccttaggctataagcaaatgtgagcaggcttacaggcgctgtgtctttaaggccccgagttcacactattcatgatatgtttcctaattatttcctttaaatgttgaaagtgctttcttttcttgccctttagggggaaaaaccaagtttcaaaaaaagcatcccatcaatgattcaatcaaagaaatgtcattaatgagaagagagaaaaaaaagtcctccaacattgtatttgggtagatttcaacagttaatttgtatttcaaaatgtgaatgtaaattaaaaggctaaatacttgaaagtcaaaagtattccttatttgacattaaagtcagcgaattgatcatatttgctgaatgtagttagtaaaaagtgctaatttatggctaagtaattaaacagggagacagatggagaatcaaatgagttttcttcacattcaaatttgcatactgtttctgatggtgcatacgcttattgctctgtgtggtgccctccagtattagaagaacatagagagctatttatgtcagctttgctcaagcaaccccaaagaaagaaaaggggaattatatcaagtcctagacttagataaaatacagagctcagttagatgttctcttctgtttctcgctcattcatcatttttgcttccatgtcatagtgggtagaataggcaactgtcaaatagtggaattttctcctttctccattgtatcatggaaaacgccatggcgtgggaatcagaagatggtctaattttagctttctcagtaactagttgtgtgacattggacaattctgttctctccagtcttagttgcctcatttgacatttgagtttaatgttgcctaggttatttctaagcagtatggcacagtggagaaagcaaggactctaattttgatcttggatcagccacctaccagctgagtgatcttggataacttagtttaaccactgtgtgctacaggttcttattagcaaaatgaggatgtttggtgatcattttatgcaaagcccttagaacagtgcctggaatataagcacctctcgatgttagctgttttgtttgttatctctaagattccttcgtgtgcaaagactcctcgagtctgtgttaaaacatgaaggaaggtgacttaatgacagctaatctagcttgcttgcaccctgtgtcagacttgcaatttctagaaattaccatcagagataatttaactatcaggaccctatttgtactcccttgatgatgtcaccagagggaaagatttcaatgccttccaggccatgccagtgctcatacccactagggtggtactagctgggggaagtggtccatcagccaatgctgtgctcagagttgtttttatagttgctggtagaacttgcagaagggaaccgtgactctctcccccatctcccatgccttcagttcaacagaaaggacctggaagtcaatatcccttgcactggcattaagagatacaactctggctttgccacctgctctctacttccgcctgagcactgctccagctgcacagagcttgctccgagctccaggctcctgctaagctagcaccaccgtcgactccctccagctgccttcatgattacctaccgagatctcatcagccacaaagaggtatcctctgacttttacaaagatcctggagatcagggacaggctgtgccttgagatggaggggaaaaaggtcagtaggacagagggtaacatcaaagacttgcccattagtgagaatgcctccactgaagacccctagggtaaaggtacagaaagcacagtatttgatgctgttgttatcatcatgaaacatcactcgccagaaaccagctccgcaaaagaagcctacaggaaatacatcaaaaattacgtgagaagagtcaaaggcaaacgtgaagaacagagaccgtaaaaagtaaaatcttttatgacagactgcagaacaaatcaagcacatccttgctaatttcaaaaactaccagttcattatttgtgaggacatgaatccagatggcatgctggctctattggactaccaggaagatgacgtgaccccatatatgattttctttaaggatgatttagaaatggaaaaatgttaacagatttggcaattgctttgatctatcacctgtcattataactggctgccacttgtcatccacacaacaccattgaagacaaatgggactgatgtcactttgagcactttattttgaccatgatttatctggagtagaggcattgtttttgaggaaaaaaaaaaccatagcatatataggttgtctaaaaataaaatacatttaaagttaaaaaaatacaactctgtgacctagactggagctgtcaactacccctccccaacccacatatatactcacatggagctccgcgaaagagagaagcaaaatttctttagaattttttagaggtttatttatttatttatttatttacctttcactggaattttttttttttttttttttgatggagtcttgctctgttgccaggctggagtgcagtggcacgatctgggctcattgcaacctctgcctcctgggttcaagtgattctcctgcctcagcctcccaagtagctgggactacaggcacatgcctccatgcccagctaatttttgtatttttggtagagacagggtttcaccatattggccaggatggtctcgatctcttgacttcatgatctgtgccccatatttaaccagtcacggatagggaagacccagtgatcgggtgcaagtggttttacaatccatttctttttcatttttgtggtgtagccagttgtttgggattacaacagtattaaaatccttaaaaataaagctcttctcatgcctgtaatcccagcactttgggaggctgaggcgggcagatcacttgaggccaggagtttgagaccagcctggccaacatgcaaaaccctatctctactaaaaataaaaaaattaaccaggcgtgatggtgcatgcctataatcccagctacttgggaggctgaggcacgagaatcacttgactccaggaactgaaggttgtggtgacctgagaccacgccactgcgctacagcctgggtgacagagcgagactgtctcaaaagaaaaaaaaaaggctctaaaagatgtccatgatggacatcactgtttggcaatcaggaccccttgtttttctaaaggtaccttgatgtacttcttattgttttaatgtaatggcagatcaagttgctctgcccttccctacccaagacttgcgaactggttcccaattaggcaactcggcttctactctgactttaaatctcatgcaaagtgacataagaatgggtgttgggcattcttcacttgtgtctctatctccgctctccagctctccaccttactcggtgttctgcaaggttcatctttatagactacatcagaaggcttccttaacatctgccttccattggggtttggccagcggaaggcactggctaaagatgagaaggtagaagagtgaatttggggtgtttttcaccttctgccctctctgctgggcacagtaggttggttctttccctctcctaatgcctcagctccatatggcagccgtaaaaattagtaataaaaccttttccagtttagtactatcatagagcagcaggcttgattattgctctttgaaaatcagtgtcaatgtgagttgaaaactgtctggaagacgaaaaacccaaaaaatagtattttaaaagctttgcattcagaaatcaggttgggagctaaaaaaataaaaattaaaaaaaagtttaaaggctgggcgtggtggttcacacctgtaatcccagcactttgggaggccaaggtagatggatcacttgatgtcaggagttcaagaccagctggccaacatggtgaaacgctgtctctactaaaaatacaaacattagctggacgtggtggtgcatgccagtaatcccagctgcttgggaggctgaggcaggaaagttgcttgaagccaggagatggaggttgcagtgagtcaagatcacgccactgcactccagcctgggcaacagagcaagactctgtctcaaaaaaaaaaattttttttaagagctctgcagttgcttttttaaaaaaaatgagaattcatttataaatttataataaatcaataaatttattaatctcttttcttggtagatattttcatttatctaaaagtatcttcttgtgtgatttcttctttgactcattggttctttagttgtattaattttcatatttatgtaaatttcccaaattgccttctgtaactgatttttaatttcattgcattgtggtcagaaaacaggcatttcttatttcagcccttttaagcatatcaaggtcttattttatggcttaacgtatagtctttcctgaataattttccatgtgtactttagaagaatgtgtgttgttctctcattgcgtgcagtgttctatagatgtctgttagatctagttgtgttacaatgttgttcaagtcttctatttcctacttgaaatatgtattggattatgtatagttgttctatctattttgaaatctccaactattattgttgacttatctatttctcgtttcatatctgttcattttgtctgattttgcttcatgtattttgaggctccgttgttaggtgtatatatgtttataattattatgttttctttatggattgttgcaaacctttgcctaatttctagagttctgacaaagttgatactgactattgttgctagtctttctttctttctctttctttctttctctctctctctccctttctttctctcgctccctttctttctctctttctttctctctcttcctttctttctttctctcactccctttctttctctttctttctttttctttctttctttccctttctttctttctttctctctctctctctgtctgtctgtctgtctttctttctttctttctttctttcttctttctttctttctccttccttccctccctccctccctccctccctcccttccttccttccttccttctttctttttcttttttttgtgtgtgttcttgttgtttttgtggagaagcagctttttggagatccttactctgccattcctggtgatgtctctctgccgtttctaataagagacagtctctgagagtttcaaatagaagtatacatttatgttgtgtgttcttggaaagaccttttttttagactcgcttttacataaaataagaaaacaattagtaaacactggggtataaaataagctttaacataattaacaactactaaactggccgtttttacatgagcataggaggtgtgacatgaatctgaaaactgatccaactagtaggcatcatttcaacgtcactagaagagtcaatctgatgagtctctgtcaatgttgacagtcttgaccatcattacattttgggtgctatttattgatctgtggttctttggattcatctcacagagtacagatgttaagtacagagactttttctttaaatatgaatggttatgatcttatccctttcaacagtagagatgtttgatgaagatttgtatctaccatgtgttattcatataaacattctgcataagtagaggttcactggagggtcactttgatttttttccaagaccatttatatattctgaagatgaataatgaactagtagagaataattactgactaaaatattaaacaaataaaactggacatgaaaaaggaagtccacatgaaatccaaggtgttgccaataaaattaagaaatgctaaaaacaatcagcaactttgtaatagcaatgttaacttttcttccagaataactagtaggtacttagattttctttttaaatattggctaaaaagcccaaattacctgaatttcctttgaattttttgtctttcctacatggaccttgccacgtttttggtcatatcgtaattattttagttgcttttattttctctcctaggttgcattggcttcagtagtatggcctgtgccagtcatttatgtttctccaaggacaccaggcacaacgtcttgcacacgattggtatattaaaaaatcgggtcttgcattcaggaaattacacactaaaaagaagaagggtttatgggaaaaatagggctaggagcagactacccaaaacctaaagtactttataacaagagtgtgagtaaagacaaacctaggagtgaaaaagagatgtaaatttgtaacaacaaaagaaatgttaaagtaaatagttctctccttttaaaaggtgatggtatgagcttcctttcttaaatacttactgagctgatagatgaatgttttctggcccaccagttagggaatgaagatttttatctccctaaaattcatatgttgaaatataatcaccattgtgatggactgggaagtggggcctttaggaggtaatgggtggagccctcatgagtgggactaagacccttataaaagggatcccagagaggtagcttaccctcttctgccacgtgaggctctgacgagaaggtggctggctgtctgtgacccagaagagcgccctcaccagaatccgaccatactggcccccgatctcagaccactggcctccagaactgtgagaaacacatttctgttgcttataagccactcagttgatggtaatttgttatagtagcctgagctgaggtaccacccattttccgaggttacagctctttgacaattcagatccacacaggggttttagttcctccctcttcatcttgcccaatgcctcagcaactattcccacatgaacactgaaacccaagtaccttggttatttagaccaacaaccaggcccctgcacatctacagtgccagcttacataaccacttttcagttctttcctttatgtggccagtagagtttcttctttcctttttccttgtgggctaaactataaattttaaaagggttttaaagatccttgtgtgttaggcagcatagcaaggcgtccattgagggagctttttgctgttgtctattatcttagtcgaccatcttcccagcagagctcccacccccattattcttttcacagaatcctttgctaacagatcactgttactagaataatatgagcattgggttcattgtgtatagcaggctacacttatgggaagagagagaaggagaaacagagatttagtaagaagaggaattcattttatattgaaaatataattttgaggccaggtgcagtggctcatgcctgtaatcccacaactttgggaggccaaggcgggagggttgcttgagcaaaggaatttgagaccagcctgggcaacagagtaacactccatatctacaaaatattaaaaaactaggtaggtgcagtgtcacatggctattctcccaactactcagcagcctgaagtgggaggatcacttgagcccaggagatggaggctgcagtgagccatgatcatgccattgccctctagccttggcaacagagcaagactctgtctcaaagaacaaaaaatagaaagtataattttgagccaattctctagagtttatcaggtttttttttccagcattttctctaacgtacactgtccacacaggaggttgaatgattgctttaggactaattactcaatgtgtgaattattagaccttttgtcttcatccctcttctctatttattagcatgtctgcagttggctggaccatggaaaaagatgtcataggaaacacttaacaaaactatttaataacaatcattaacgtctcttatagaaccgtgactggaaagatggaaccactggttgaaataagatctgaatccttactgtctctgctcttgttctcttattctatacatataaatttgacaactgcatctgaaacaatctgtagggtcctgttgctaaagggaattttaaattttcttccatggaacactaggtttccagagagtccttaatgaattctgcaggaaatagtgtatctgtttatttattcaacaaatattcactgagtgttggccagttatctgacactgggttgggcctggtctttggggagacaggactgccaagtttctggccctcactccttcaaccagagcagctctgctggtgtctgctttgtagttgacaatctgggtatgtgggggaggaggttctgctgcctaaagaaaatttgaaggcttctgtggcatagggaatgcccttatttaatagaagttcttattaagcaaagctattttggggccgtggcctaatagttgtaggtttatgcatctgtacaatgaggagcacatagtgagtatgtgtgtagttcagggtagtctatattaagctgctgtaacaaatgtcccctatatctcagtgacttacaacaggagaggtttatttcttgctcatattatacgttcgttgtgcattgtctctgtctccagtttgagtctgatctgacttttggactccagctaacggagcagcctctttctggagcatcacttgtccatagtgggggtgaattaaaaacacagtgagttaacatttgtccttacagcttccgcctgggagttagacaggtctctgctattgacatctcctgggctaaacaagttaaatggcttcactggatgtcattggcacagggaaatataatctttccacagggagtgatagcaaatatttggtaacaacaatgcaaagtgctctagtgctcagtaaatatgtgctgattaaacaactatatacaatcaacaaccatgtatcagtgcattctcagctcccgaccctgtaaaccagtttttctgagtaggagtctctgagatgttgtgctttttgtgttatggggagagctgaaacgagctgaaaataatctcaagatttttactgttacaactaagtcacaactggccttcaacactccccaccaactgggtaaggaaaccacaaatccagtccccaaacccacatctattttgccttttcaaaatgtgttgtaaaatattagaaggaaaatggtctggaacttctaaggattaagaagaaattcacatcagcagaaagcaagactgtaaaccccccgggagctgaagagctcagttccagagccagattgtataagacggggcttcaaaactaatctggagccatcttatgtaaaacaaattgtccgccaacaggaagcctcaaaacagggtgcagattatgaaggaatgaaatggattccaggctgctatgaggattttcttgattgaaacaagaccaacctatggaaccatgctctgtgtgagtccaccatttcccccttctctgcaaaaacatgaaagaaagcatgtagaatttttgttgtggctggatttcataaggggaagatgcttctctgtgtaaaaagatatacaagagaaagctgtggttggaaatctgcagtgtaagcgacaaaaatctcaactcaaagttgcctttgcaaaaggaaatgattctggttctcaaagttgaaaagtccagagatggattttgcctttagatatgactggatccaggagctcatgcaatattaccaggactctctgtctttcaccttgcttttgtttggctttattctgcagactgggttgcatccatccagttttgcctcatcagggccttgcctgttgcctgccacgcttgccttggctgtgcttttaaacatctccagagctatctgcaacagaactgcatctttagccagctgctggcctgtgtcagttctttctctgcagctgatagggcctctttgtgggctgccacccaggtcctctggctctcatccttggccatttactgctggtaatcaaccctcagtctctcatcatctttctgcagggtggcagcatgacttaacattactcaagcaacgctgttgtctttataggatttgttcccccagatttttcaaaacccacatcattgcacctgccacaagcttctctgccactggacatttggccaggccactgctggtgaaatctgtcatattaagagccataccacgtaacagcggttatccttgccctacctaccacacagaccttatgctcttggcctgccaggcagtaagtgaggaagtcagaaattcttgtctttccacatgtattgtctgacttctttagttactgcttaagcttctaggtcctccaagaaacagacgttaacattggattaagtgtgtgggaattttattagggcaaatgcctgtgagaaaatgggaaggggatacccctcacccttagatctttttttttgagacagagtcttgttctgttgcccagtttggagtgcagtggcatgatctcggctcactgcaacctccgcctcccgggttcaagtgattctcctgcctcaagctcctgagtagctgggactataggactatatgcgtgccaccgtgcctggttaattgtgtgtgttttttttttttttttaagtagagacaggtttcactatgttggccaggctggtcttggactcctgaacttgtgatccatctgtctcagcctcctaaagtgctgggattacaggtgtgagccaccacacctggcctcaccctcaaaccttgagagatgaaaggagggaagggtgagtggaagtttcctctactgataggaagtttaaagaaggttccacaagaatgccatgtggtccttcagccaacgttgccatcagaagggtcctgtctccaggcaagattagctgcataatttgacggtccagtgcaaaaataatatgcaggactcagtgttaaaaatgtattaagaattttgggctgggcgcagtggctcctgtctgtaatcccagccctttggggggccaaggtgggtggattgcttgagcctaggagttcaagaccagcctaggcaacatggtgaaactgtatctctacaaaaaattagccagacgtggtggcatgcacctgtagtcccagttactcaggaggctgaggtgggaggaccacctgagcccaggaagtcaaggctatggtgagctgtgattgggttattgcattctagcctgggcgatggagtaaaaccctttctcaaaaaaaaaaaaaaaaaaaaaaagagacagagagagaatttcaagacaaaatagcagagtgctcaacggagtgcagggtccttttgagttcaggatcctgactgagtgcatgggtctcacagccatgaaaccaagtgtggtctatcttagtatatccccactgtgcttagtaatcagcagccaagcccttggacaattatggctccctgtagttacagaacttctaggcatgttctcatggttcctacagatgaacaaattttttatttttttgtatggtttttgctttttgtctcttaagaaagctgaagataagcatgttaccctctatttctagctaatactttaaaatgttttggggctttaatcctgatggaatttatttgtattattggtatgaagtaggggttaacttattttttttccttcagttgataaccacgtcgcatcatcatttattgaatggctggtcttttcccttctgatttaaacgtccactgttgtcaaatattagattcccatatacaaggcatgacaggaagtgataatggagctgtttttatcatatttttgctgaatccccaagagtgcagacgccttgtctcacatttcatgcggaagcatctaaaggattgaaaaagggatatctcaagacagtttttttggaccgggtgcggtggctcatgcctgtaatcccagcagtttgggaggccgaggtgggtggatcacctgaggtcaggagttcaagactagcctggtcaatattggtgaaaccctgtctctactaaaaatacaaaaaatcagctgggcgtggtggtgcgtgcctgtaatcccagctactcaggaggttgaggcaggagaattgcttgaacctgggggacggaggttgcagtgaaccaagatcacaccactccactccagcctggaggacagagtgagattctgtctcaaaaaaaaaaaaaaaaaggtagacccttaacctatcaataatataggtgcataaaataattaagattgaagttggaggagaattgtccttagcgttattggtgactcttgagtctctcccacctctctccttgccccctaggttctccttgggcttggccattgcaagtccccagccagagctgcgagtggacaaggagatttgtgggagcattgcctgcctggctgcctccctgctgggcgctgtttgtggaatcgctgcagttccctgcctttggccacagcatgtgctggacttagacacccctccctcctctgctcctccaagtccaggggcgagatgtgctcccggcttttgttcccctcagaggacttcccctcctttgtctgtttccctcaactctgcccatgctcttattcagaatcctcgcttcattccctcatcttccattttcccttccaaatgcaccatctgttcccaatggaaaggaacatcagtgtgatgccctctcatcttttagaagatgatatttcttcatttttctcctaattcaagccttaacataagtagttttgtccattttgtgctgctgtaacaaaaggcctgagaccaggcactttataaagaacagaaacgtattttttcacagttctggggctgggaagtccaagatcagggggccatatctggtgagcgcctttgtgctgtgttatcctatgacagaagagaaattgcgaagagagggctagaggtagagatagagatggagacagacaaagggggctgaacctgtcctttcataaggaaactactactgtgaaaatggcattaatccattcatgagagtagagccctcgtgacctaaacacctcttaaaggtccacctcccaacacctccacactggggatcaagttttggagcacacatctgaaccatagcaatatgattattgaagggaattggaggcacagtgcagaaaagttgcaggctgtatccccagtgttcttcttttctctgttctatcccccatccctaggtagtcccatctaggcccagagtttcaaatccatctattaatgtatgctgcaggccgggcgcggtggctcacgcttgtaatcccaatgctttgggaggctgaggcaggcagatcacgaggtcaggagaccaagaccatcctggctaacacggtgaaaccctgtctctactaaaaatacaaaaattagctgggcgtggtggtgggcgcctgtagtcccagctactcaggaggctgaggcatgagaattgcttgaacctgggaggcagaggttgcggtgggctgacatcacgccactgcattccagcctggtgacagagcgagactccatctaaaaaaaaataagaatatgctgcagactcttgaatttatatcttcagccagtcttctcttctaagttccaggtttgtatgtccaaaacctatttactatgtccacctggtgtctaactgagctcctgatctttctccacctccatgaccccaagccaccctccatctgatacaccttcctccttcagaccggcctatctcagtcatggcatgtcacacacccagctgctgagacttcagtttggagttactgataatgatttccctattactctctgctatggactgtttctgtctcctcaaaattcccatgttgaaatcctagcccctaatgtgatggtattaggaggtggggcctttggagggtgattggaccatgaatacggttagtgcctttatgaaggaggttgatatggtctgaccatgtcctcacccaaatctcatcttgaatcgtagttctcacaatccccatgtgttgtgggagggacccggtgggaggtaattgaatcatgagggcagttacccccatgctgctgttctcatgatagtgagtgagttctcacgagatccaatggctttataaggggcttttccctcttttgcttggcacttctcttacctgccaccatgtaagacatatctttgctcctccttcgccttccaccatgattgtgaggcctccacagccatgtagaactgtgagtccattaaacctctttcccttataaattacccagtcttgggtatgtctttattagcagcgtaagaatggactaatacagaggtcacagagagcttttgttctgccaaatgacgatacagtgagaagccaccatctatcaacgggcaagggggtctctggttcatagatggggagtcctttaccagacactgaatatatatatatatatatatatatacacacacacatacacacacagagggtatatagatacacatatataccccctacatatatacaggggtatacatatatacaaggggtatgtagatatatatacagggggtacatagatcaattcacatatagatagatagatagatagatagatagatatacatatatacagggggtatatagatcaattcatatatatataaaacaccttgatctatatacctcctgtatgtgtgtgtgtatatatatgtataaaacaccttgatctatatacctcctatatatataagacactttgatctataaacctcctgtatgtgtatatatacacactgtgtgtgtgtgtatatatatacacacacactatgtgtacacatatatgtgtacacattgtgtatatatatacacacacacatacacacacaccataatatatatagtattatatattatagtgtatatatatacaccatatatatatactttatatatatgtacatatacaccataatatataatacaatatatatatattatggtgtgtgtgtgtgtatatatataccatatatatatatgtggtgtgtgtgtgtgtatatatggtgtgtatatatatatatatctcctattggttttgcttccctggagaactctaattaaaacaatagagacgataaatcagtaaagtagattacatagtgcagcagttagtgataaatgcaacagacaagtccccataatcttcattttcttcatagcatcacttgtagctatcttgcttgttagttacaggtacagttatctgaccagtgtacagatagttgcagctatggttataggttgataacttttttgctctcggccctgtctaccagtgtgttattcactgtgacatgctgttctggttatctttgctgtgtaacagtgcagcccaaacttagtggcacagctgttagcagttgttttattatactcacacattctgtgagtgtagatttagaaagggcaccatgaggatggttatcctctactccatgatgtcttggcctttgttggcaagactttagtctgggggctaagagagtgggggctgtaggaaacacccctaaactggcttctttatggacacttctggtgcctgggcttggatggatgaaaaatgggctgaactgtgacagttgatggagcattgtgtgtggcctcccatggcacttgggtgtgtcacagcagggtgactgggtttggagagagaacttcccaaagggggtcttcagacagtgggcatcccaagaaagccaggtgtaagtggcttgaccttttatggtctagtttcaaaagtcacattgcttcacttctgtcacactctgttggttcaagcagtcatcagcccagattcaacaggaggggtacacggatctctcaattgaaagagtgtccaaaattttcaggccatgttccaaaaccatctcccatgcttaacacatagcgtagttcctagcacataaaagtattcaagaaatgtttgttgattgcataaacagaaaagcccaagccaaacaaaataaatattgtacttattttaccacctagggatgatcactcttagaatatgcttccacctattttttcaatgcttggacttaatttgcatatattatttttactcaattatttctataagtactattaacattatagtattgttctacttagtattataactttcccatgctcataaatactcttctacaccataataattgtggaatcactgtgtagtcggctgtgtagttgcatgctttttgaagatatcatattttacctatttaattcccctagtattagataagtggatgtcttcagtgttttgtaaaatatcctaagtaaatacagcaataaatatatttatgagaacgtctttgcacacttttctaggaattcttttttttttttttgagatagggtctaaaaaacagctggatctgctgcgctttatttacttactgttttttatttttattttattagagacagggtctcattctgtcactcaggctggagtgcagtggtgcaatcatagctcactgcagcctcaaactccagggctcaagcaatcttcctgcctcaggctccagcagctgggactacacgaacataccaccacaaccagctaatttctaaaatttttcgtagagatggggtctcgctatgttgctgaggcttgtctcaaattcctggcctgaagcaatcctcctatctcagccttccaaagtgcagggattagaggcatgaatcaccataaccagcctctaggaattcttttaaggataaattcctagaagtaaacttgctgggtcaaaaagtatgtgcatttccaagatcaccggtatatattcatataatataattttctcattttggaggaaccaaaactgaacatccaacaaaatcctttttgcatattttaagttagatgtcttttatttaaaaacaataaagctatctaaacacatatttcggtcaaaaacaataaaaacaaaagcaataaaacataagggtattctcctttattctaagtatttacttctatggtttttgctttgttacagttggtatttcagtcgaatcagtagtgcttctgaaaggaaatatcaggaggctttctaaaaatatcacatctttgccaaaatgttcagatttgaaaatgaaatgtgtccctagtaattgaattccactgcaaacctattcatctcagttcttaggagcaaagaaaattgcacctcgagagtcgtgactatagcacattacccatgacttgcaaacttgcttgaacaaagatctggagcctagatatacataaagagaaaattcaggttttattgtgcgatagtgatacagtgcttcatctcttagaacatgatagcgttctatgagttttaatcttgttagggaccaccctatctcatttttcacaactttcgttatattaatgatgggtgttgtaccaatgcatactctaatttttatagtctctaatttttatagtaaagaaacatgatactatactatactgtactgtactataagatagctgtatttaaaatttatgatctttgtataatcaagctctccctatacacatatattaagttctacttgctttaaaactgcacattctatgtttggctttatggtatctaatatttatttatttatttatttattttttgagagaggatctcactctgtaacccgagctggagtgcagtggtgtgagcatggctcactgcaacctcattgagcctcctgggctcaagtgatcctcccacctcagcctcctgagtagctgggaccacaggcgtgtgccacgatgcccaaatagtttttgtattttttgtagagagagggtttcaccatgttgcccaggctcatcttgaactcctgggctcaagtgatcctcctgtcttggcctcccaaagtgctgggactacaggcatgagacaccacacccggccaactatctaatatttagtctggccagtgtgatgtcaaatcacttcaacagtatcaggaagatgacttataaaagatctctctctctctctctctctctatatatatatatatatcacataaaatagacatctctctctatcacatatatataaaatatgcatattttatatataaacatatctatatatcacataaaaataaatatctctatataacataaaaatcacatctttgcaaaatgttcagtgcaaatatatatgtgtgtgtatatatatatctgtatgtatatcttctttagagcaaatgatagtggaataaaagaataaaggctccaagttcttagattgaaaataaaatgatttatagttgttttctctggtagtgttatagcagcatcagcttgacagcctgtagtgacattatcactactactgacaccagcctctaatgaatacttttaagatctctgttcagcagaggtttcccactatgtcttccaacttcctgctcttttaccgtgtcttctttctgtgtaggtgaagtgagcactggcgttgtgaggaattctttgcaatagttggaatcatgttccagacacatgctagagtatgtgactataggctcaaactttgcttccttcttttcccttacagcaccataggaatgttggcatttttttgctagctgttccactgggttctgggaagaatatgaaaaatttgcacataaagaggtttttttttttttcttgagacagagtcttgctctgtcgtccaggctggagtgcagtggcgctgtctcggctcgctgcaagctccgcctccagggttcaaaaaattctcctgcctcagcctcccgagtagctgggattacaggcgcccgtcaccacgcccggctaattttttgtttttttttttagtagagacagcgtttcaccgtgttagccaggatggtctcgatctcctgacctcatgatccacctgcctcggcctccgaaagtgctgggattacaggcatgagccaccatgcccggccaagaagtttcaaaataagttttaaaagatgaaataaataaccatttaagattcttgttacaaaaaataaacttcaaattttcagatataatattagtttatgtagactcactcaacagatttgggcaggatttatttatttatttatttatttatttatttttgagacagagtctgctctgtcacccaggctggagtgcagtggtgtgatcttggctcactgcaacctctgccttctgggttcaagtgattctcttgtctcagcctcccaagtagctgggattacaggcgcctgccaccaggccccgctaatttttgcatttttagtagagacggggtttccgccatgttggccaggctggtcttgaactcctgacctcaggtgatctgcctgcttcagcctcccaaagtgctaggattacaggtgtgagccactgcacccagccaagacttttttttgttgttgttacgctaaggaaatttctgttataacaacatactggtactttgtatcagctgggactttggcggcttgacttattcaaggattatgcacttgcaacacggtggtcctggctgggttaggttaacagggttcccgggacccgaaagacaatactgggtacttagaagtgtctgtattgtttcccgtcattcttaagggactcagaagtcccttgggaaggaagttgattcctgttgatgatgggttatattctcatagcttatgacgccatgatatgtcataagtctcatctcatctgagacactgcatctcagtctttctcctgccacctgtgaagaattccagatgtttccataggccccacacaaaggcttaagttcacatcagaactgtctgattattcttagtttacacatcagaactgtctgattattcttagagtttacagaaattgtaaaaaatatttctgggatatttgaattcttaattaaaatttcaggaagcccagaggctcattgcataaataaataaaaatagaaatagaaatattctactatctcaattcacaaatgctatctcctttccacattttttttttcccctgaggaataactggcaaaaaagcctaatggttcctctaatcatacttccatggaagtattacatgttgtttttactttggttcctgggtttttcttccttgtcagtcttcagcacttttttttggaagtgaatgcacaccattggccagtcaccaagtcaccaaagcttgaatttttttttttttttttttgagatgcagtctcactgtgttatccaggctggagtgcaatggggcaatctcggctcactgcaacctccgcctcctgggttcaagtgattctcccacctcagcctcccgagtagctgggactacgggcatgtgccatcactcccggctaatttttttgtttttgtgttttttttttttttgagacaaagtctcactctgtcactcaagctggaatgtatgatctcggctcactgcaacctctgcttcctgggttcaagcaattctcctgcctcagcctcctgagtagctgggactacaggtgcccgccactacgcctggctaatttttgtatttttagtagagacggggtttcaccatattggccaggctaatctcgaactctggacctcaagtgatcggcccacctcggcctcccaaagtgctgggattacaggcgtgagccactgcgccctgcccaaagcttgaattttatacctgttttcttttgtgcaatgtactgtatcactaaaaagctagaatttttaaaatttatttaatttttttaatttttaatttccataagttttgggggaacaggtggtatttggttgtatgagtaagttctttagtggtgatttgtgagattttggtgcacctattacctgaacactatacactgaacccaatttgtagtcttttattcctcacccccttcccgccctttccccctgagcctccaaaatccactgtagcattaccatgcctttgcatccccatagcttaactcccacttatgagtgagaacatacaatgtttggttttccattcctgagttacttcacttagaataatagtctccaatctcatccaggttgctgtgaatgccattaaatcatctctttttatggctgagtagtattccataatacatacgtataccacagtttctttatccactcattgactgatgggcatttgggctggttccacatttttgcaattgctaattgtgctgctataaccatgtgtgtgcaagtatctttttcatataatgacttcttttcctctgagtagatacccagtagtgggattgttgaatcaaatggtagttctacttttagttcaaaaagctagattttttactttaattaaggtagacctcattaaaatcttttattacatttttttgagttcaagtctggaccctgaattttctattgtgcatctagatttctgtttgtataagcttaaatgtattaattctcttttgagattggttcctattttggatattaggcttttgatctcaaaagagtagttggtttccacacttctacttttcgtgtctacgttgaccctggagcactcatttatcttcactatttgtcttagtccatttgtgttgctataaaggaatactgaggctgggttattgataaagaaaagagatctatttggctcatgctgggataatgtttgtaaattttaattgcagtgaatgggtatttatgtttacatctctagcttattttactgtgtgcattttagccattgtaattcattttattatttattttacagtaatatttattatgaattgactaatgctgtataaaaagcatggcagcagcatctgcttcgggtgaggcttcaggctgcttccactcaaggtggaaggtgaaggggaccagcgtgtgcagagatcacatggtgagggaggaaggaaaagggctggaggaggtgccgggttctttgtaaaaaccagctttcatgggaactaatagaggaagaactcaatcacttcctcccagcccagaaagggcgctaatctattcatgggggatctaccccccatggcccaaacacctcccattaacattgtagatcaaattacatgttgagatttggaaaggtcaaacatccaaactaaagcactattatagtcttatctccctgttaagggcagctccttccttttccttggagatgatgcagagaacctaatcctacctcccttcctggccaagaggccaacaagtagagttaagtcacaacatggcacagctgctgaactgaataagggagcaatgcaaccctatgttgaaggagcgggaggatttacccaatgcgtgctggcagaagaatggaagaaactggattcttaggtgctggatcaaggggagtgaaacataaagttggaaaagggagaacttatcaatttgggagcatcctgctgggatctagaatttaatatgctggcaagacccctggaagagacacgctactgggatggctcttagagcctgggaaaagcactgtactacactaagggaagcagaaatgccagaaatgccagaactgccgtggcagacagagaagaaggcctcagagaagtgggcatctagaactcatacacacacaaggctagaaacctcaccaattgattacattgcacacaaaggcacagagggccttccattgtcctaagcaataagaaatgcactagtgagaggggtgctggaagcagtgagaagctcagtggtggttctcccagggctgtagtaggagatgccactgcagaatttggtttattgatataaattgatatgataggacattgaaataacagaggccaggtggcagcactctaccagaagccaggcaggtgcagttaagataaagagtgtcaaagatggatggcagtcaaggaggattcacccacatggagtggtaaaaacagttaaagagtgtgatgtccctaggggtaagacagatggcaaatgagtgaggatattatttactttatacaactagaagaaatcaagggtggatgatcaggaagctgagggcagctgcccaataaacaaataatgatcctttgctcagttttcaaacttgagccaattttctaacgtggagtccattgactgaaaagaagtctggatctttgggagaggactttactatattacagcaaacatgcacagcaatgattcggccaatctgtccctagagggacctaaggccacttgcttgggtaaccacatgcaagaggaaggggcatggcagctagctcccaagatcagctcctagctcacctcctagtcttcatgcctctgtgtggtcctcttgcatgttgaatggggccaacctgtaacaaatcggacattgcacaaatgatggagtgtgacttctgaagctaaggcataaatacactgtggcttctgctttgctcttaaacatcactgcatttggcagacgccaactgccatttcataaggacactcaaaccaacctttggagaggttcaagtagcaaggaactaaggcttcctgggaacagctcctgtgaacaacagccatgcatcatagaactggatcttccagttccaatcaagctttcagttgactgtagctccaacccacatctttttttttttttctttttttgagtggagtcttgccctgtcgccagactgcagtgcagtggagcgatcttggctcactgcaacctccgcctcccgagttcaagcgattccccagcctcagcctcccaagtagctaggactgtagtggtggcaagactcctggaagagacacacacaaaaactattttttttatattttaatagagacggggtttcaccatgttggccaggatggtctagatctcctgacctcatgattcgcctgcctcggcctcccaaagtgctgggattacaggcatgagccaccacgcccggcctccagcccacatcttgactgcaaccttgtgaaagatcttatgccataacctcacaggtcagccactcccaaattccagacccacagaaactctgtgagataatacatgtttattgctgttttaagctactaaattttagtgtaatttgttacaccgtaataaataaataatatagggaccagacacttcaatgactatctaggtctgaattgatacccagagaattaaagcctcattgtagactccctgttagggtgggggccgataggtacaagatgattaattaagtctaggcctaggtcaagccacagtgcgtccactgtctccatggacttaggtggtggttgtttccacagttgcgaagtgtacaattggaatggacacacttggtacctgccataactgctgcattatttggcctgtgaggtaagagatgttgtaacagaaggctgagtggaatgccctaaaactgaaagacaattctgcatcccaagagtgttagagatgagtgtcagccttaaggacttagaagacgcaggtgtgatggccccagcccatctctatttaattcaccagcctggcccctgcagaaaccactggattctggataatgatagtgcactactgcaaactccatcagaaggagcccagattgcagctgctgggcttggcatggtactttttttttttttttgagacagagtcttgctctgtcgcccaggctggagtgcagtggcatgatcttggcttactgcaacctccgcctcctgagttcaagcaattctctgcctcagcctcccgagtagctgggattataggcacccaccaccatgcctggctaatttttgtatttttagtagagatggggtttcaccatcttggccaggctgggcttgaacttctgaccttgtgatccacccacctcggcctcccaaagtgctgggatttcaggcgtgagccactgtgcccagcctggcctggtatggtattttttactaaaacagatgaatgtagcctttaggggatgatatgtggccattgttctggtgaatgcgttattttccatcactcttgaaaggaaaaaaactgtttgcattcccttgaccagacaatcgtatgtatttagtcttccctcaggtggtgctaactctcctaccctctgtcatgtgtgatatatagtctgaagagaactggacctcctggacatcctgcagaacggcaccctggtccactgtatcatgcctcatgtcaatcagatatcagatgggtgagcaagatgcagcaagtgtactgaaggccttggaaagacacatgggcttcagatcatgggagacaaaccctaagtttcagaggcccatcacatcagttgtagaagtctggtgttccaaggcgcactggggataaatgtaaaggataaattattgcatctcacacctcccaccatgaagaaggaagcacagtgctggtaggtcccatcgtttctggaggcggcatattccatatctgggaatactcttcctacccatagactggattacatggaaggctgcctcctgtaagtaaggcccagaggagggctctggagtagatccaggctgcagtgcaaacagcccttctgcttgggctgaacaatccagcatgccttaggttactagtgatctcagaggtagggaaaggccaccatgttcagtttacagaaagttccactggggaatcatgaaggactcctagggctccggagcaacgccatgccatctacagtagaaaattttacactcttcattaaagagctcctggtgtgctgctgctggaccacggtagagatgaagcagctggacatgggacaccaagtgaccatatgcacctccagaggtgccccgcacaggctcatcaggttctaaggctaggtgggccctgcagtatccaaggcaagacagaagttctgcatccatgatcaaatatatcagcagggcctgaaggcccaagccagctacactggcagctagctcagaattccagagcccccaccactgttgcaccaagggtactccctcaactcacacctatggccacatttggaaggggaaatccttatgatccacagatggaggaagaaaaagtgagcttggatcttggatggcaaatgtggacaaaaatggacagtgactgccctacagctgtactcaggatgggccagaaaggcaacatcaaggggaaaccctgatgggtggagcttcattggtgcaccaggtcatctacttggtttagataaagaatacgtatcttcccccttccctccctccttccctccctccctccctgccttgtttccccttcctttcttccttccttcccttctcctcctccttcttcttgttcatcatctactgatcaatgtgtctattgatctattttctattaatcacctatctaggtgtcatctatctctctatctctttatccgtatctactaattatctatcatccattggtcattcattatgtatctgtcatgtatcatccttctatctattgaatctatcatctgtttctatcaatcatctatttatctatcatctatttattggtctgtctctttactaattatctattatttgttgggcacagtgactcatgcctgtaatcccagcactttgggaggctgaggagggaggatggcttgaactcagcagtttgagaccagcctgagcaacatggcgaaaccccgcctctgcaaaaaaaaaacacacaaaaaattagccgggtgtcgtggtgcatgccgatagtcccagctgtttgggaggctgagatgggaggatcacttgagcccaggagatagaggctgctacagtgagccgtgatggcaccactgcactctagcctgggcaacagagcgagaccctagctaaaaaatctattatctatctatctatctatctatctatctatctatctatctatcatctatctatctatcatcactatctttctacacacatggactcattggcagtagcaaatggcttgggcagttgatcaggggcctggaaggagggaaactggaaggtgagggttgaggagcaggcctagaatagtggcacgctctgcatggcagtgggcccaaagcctgcagatgtgtgtatcacatgctaatgctcagcagaaagcctccgccacggaatgaaaaagccccggacaaactggtcttttgacccattcactctttgctttattttaaatgtatcgttttcagatttatgtcccagacacttttcgctctgatgtaagaatgccgtgctaagaacaataaccaaaatagcttctattttcgtagcatatgcccataatttgcctcattttaccctggcagcagtcctgggacttaggaatgacagggagaagttcttcctttccagatggagaaagcggatgcttagagacagtaagagccctgcccagggccacggaggcagctctggcctccggtcctgcattctcttcccggtttcttgggcccctctgggctgcggagggaaagcagagccgagttgaccagcagggggcgccggcctctttttgtctacatctgtccacctggctgtgccaggcaggcttctgcaatcagcacgcgtgcccagttctgtgactggtgagtgggctcagttccagggtgccctccgcctcactgcatctccacctgctggccacaccgtagaccatgctctgttgtatgtgctcacttctaagtatccccagacccctcgctgctgcaggctctactcaatccctactaagaaatggacaggagtcagcacccagcgaaaggctgtaaataagcctcagcgctaacaataacctttccctccctgccataatacaaatgtggagcttgtcatcgaggctcctctttgaggcatgaatattgatcttttgccatatgtctttatgatgtgtgctttctccagcaggacccggttttgttgcgtttctcctttctgccttctcatttattatggtcgtctgcttctgcaacgagactccctgtgaattacaaatttagtcaaccacaatgaatttgtgttgagcactccccaggagccaggcaccatgcatagtggacttaaccaaagtcccagccctcatggagcagacattctagggaaggagccagacaaaaagcaaaacaaagagggaaatgatgtaatttgtcagatggcaataagtgctgtgaaggaaaataaagcagggaaggggataaggaggtggggtgcaggggagtggggcgtagcccaggggaaatttgcatcagagagaaaaggtcagagaaaaggcccacagagaaggtgacatttgagcaaagaccggaagatgatgaggaagccagctctacagatatttcttggaataatattccaaaaaagtaaaaagagcccactgggggagtgggtcccacacacaggtcagtgtggctggagggcagtgaataggaggaagtgagatcagagacatgatgggatgagggaagagagatgagccctgcagggtgggatgcagattgtgctgggcctggcagggccatagggatgatgttggtgtcagtgtacgatgggaagccactttcaaatgagacatgcatacaagggggaatggtccagatcagtatgtgtgatggcctcttcctatagaatatttaaagttccattccttctcaatagcctctatcagggatttacaggaagagaccacacatcaagacgtcctaaagccctgggcccatctgtagttgggaggtggcaggtacatttttcttactgaaatagccattacattcatcttttggagaccgatggaggtacaactgtgatgagtcctgtgagaagccatcagcatcttgtttgaagaatgcacctttttcttcttgaatatcagctcagtggctgctgggaagcagctgccggaggttggcctggtgtcaccatccgtacaccatcatgctgcagtgccacaaccacacaaagctcagcaactccttcctctcccacatggacagatcaagagttgagatgaagctccgcattgccattgctgcacatgtacagtgtaccaggcatgcataggtgttgggatacaaagtccctcgcttcatggacattaaatgagagagagagagagagagagagagagagagagagaataaacacataaacaagtgaatgcacattcttctgttagctaatgatgaatgacatgaaaagttgagtgtggtagttagcgaccctgggacagtctgcctgatttctgattttctgattgagagagcagagccctgaatgaagcaagaaacttcagcaatgttgaagaagtgtgtcatgaactgaatgtttgcatccccctggcccaagttcatacattgcagctgtgacctctgatgtgatggtatttgcaggtgagaccttcggaaggcatttaggcttaatagagagcatgaaagtgggaccctcatgatccgattggtgtccttataagaaaaagaagagaccagggctgtgtgtctttctgccatgagagcacgtggcgagagcactcgtctgtcagccgggaggacagccttcatcaggaactgaatctgctagcactttcgttctggacttctcagtctccatcatcacgtgagtcaatttctcagtctccatcatcatgtgagtcaattccttagagtaaatctctatatatgtatatctgctggaacctaaatcttggattcctcagaacaataagaaagaaatgtctggtgtttaaaccgcccagtctaggtgttttgttatggcagtctgagcagacaaagacacagaggtaaagcctttgaagcagggaagagcttggtgtctggctcccaggaggtgacagtgaagaggtgggcagggccatatcatgacaaagcgcttggggaatcttttctgcaggggtctgttgaacagctttcgagtgcagggaagtgatatgatctgattcccatttttttttttttttgagatggagtcttgctctgtcgcccaggctagagtgcaatggcatgatcttggctcactgcaacctctgcctccagggttcaagcgattctccctgcctcagcctcccgagtagctgggattacaggtgcctgccaccacgcccggctaatttttgtatttttagtagagatggggttccgccatgttggccaggctggtcttgaactcctgacctcaggtgatcttcccccttggcctccttaagtgctgggattactgattcccattttgaagaactggttttggctttggcgtggaagcaaaggatgccacttaggaagtgagagaaagggtcacaggcgggtataggatttgctgatgggttggatatgagaatcgagaagcagaggaagcaaaggatgactgctaaattttggggtgaatttgggtgaagccttaggaaagaagcacagaggggtgtgtgtgggtgtgtgtgtgtgtgtgtgtgtgtgtgtgtgtgtgtatcccaagttaaatgtgagtgagatcctatcagacagcccggcagagttgaagagggttgacataggactctggtttcagggaagagatccaacctggagattatgcttttggattcatcatttaccagggcaattgtgctggtggacctctggggcattcttgagtgacttctcttagtttatgatgatgatagtcgtattgatggaaggtgtgaaagccaaaattcaccttgtacttataatgtgccaggcactgatctgagtgctttgtgtgcacaatctgattgactccacacaattccttaatatcccatttttgcagcttaaggaaactgaagcatcaaaaggtaagtgtcacgactcatttttagagaagcatttcattgtggggatgctggcagtagcctactctgcaatagcacactgggctgcctttgcacacgagtctttatgcctgaggaaccctttcttcctcagccattgcattgtgcacgttcaacagctgggtgttgtgaaagaataatgctggacacgaactctggggacacgggttcaagtccagtctgttatttatgggacactttgttttgggaacatgaacatatagagttcacaggatgtcttccaggcaaagttgatccatgtctgccgtctttgctttgccatccgttccttctccagttaccagacggcttctgccagcctaaccccttctagccaactctcatttcctggctgtgccagcctgattacttctaattgtctttgactgcttccagctgggtctagaagctggcgttctgtgggagcacagaggcagtctcccagccatatggggcgaggagatggggaaggaaaagggaaggaaggaagcagctggtacgagtcaactgagaaagcttcccaaggcttcacagcccactgggattgctcctgtttctgaaagggttaactcatccaagttagagaatgatccatcttcgacaagacaaacaattatatttgttgatccccaaaggcaaccaacaatgcacctaaaaatgcttttagaaagtcactggtaacttgtctcccccaggacttgatggggtcttgctctcaggagcagtaaaaccccacttgagaatcagtgaatgattactttcattcatttattcaacagatatttactgaacaatgatcatgtctcagacaccgtgctaggtactgtagggcaaataatgaaattagacacagctcctgtcctcaataagtctaaaagagaagaaagtcatagataataagtactacaggacataagaggaatgtgaaatgactatatgaactaagagacaacagagggagatgggcttcttgcagcttattggttggggaggtcttcatgggaaagggaacacctgtgctaggtggaaatgagtcggagacagcagactgggggcgggcaaggcacaggcaaaggtgtggcagtagggaggccggatcccggccagcaccaccccctacccgggaactccgcaggaggataaggctagaaattagtttgggctaattagcagagaattttcaaggctgcattactgttgcattgaataatcagatgctttctgcacactgaatatgagggcaatatattgtgtactaatttgttttacataaagacatttctggggtgatttcttgttaaacaggccatttcagagactaggacttgtagttccaaaaccagttacaaaggggacgcacggataggatttggacttctctttggcatccatcccagcttatggaattagcagtgaacttgaatcaaacccaggcagcaggcttgaaaaagatttaatgggcctggattttctctcttcttcacccctttcctgacctctaccctgagaggataattaaaaggaaagaaaatctctatttcattgtaaatgtcatccaccatttttatgaaactttttttttttagaccataaaaatactttggggaacagtctcagaaatttcccttaaaccttaataaataaatctctaaattttcataaagagtgcatgtcctaacattaaaaaaaatcatactctattaacacaacattgggtggactcccaaactgtttctgatggaagattcagagtggtttttttttttttttttttgagaaggagtcttgctctgtcgcccaggctggagtgcagtggcaagatttcagctcactgcaactttcgcctcctggattcaagcaattctctgcctcagcctcccgagtagctgggattacaggcgcccgccaccacgcccggctaatttttgtatttctagtagagacagggtttcaccatcttgaccaggctggtcttgaactcctgacctcgtgatctacctgcctcggcctcccaaagtgctaggattacaggcgtgagccaccgcgcccggcctcagagtggtttttaccccaaagtgagctccatattcctcattctttagacagttgctggacatctattctgctggcaccacgctagttaccattcccctcccatgcaactgtcctgttaagatttgattactgaattagagacattaaaaggattgaatgaacgttactgaaatagtcaaggccggtgggagcaaagaagtcccttcagcacagcaagaaaaacattttaagctgtatctttaatattggtaaacgggaacaatgagacagaacaacagaaaacgcagtatgttccgtcataataactgaggctggtgacttgtaacaggtaggtggatgaatatagtagcgtatttaaaattagatgtattgaaagcaggcatttctctgcgtccctcttcagatgggtcagcgagacccccagacactggattgatgacagctgttgttcccccaccccccactcccaatctcaaagcattgctatgggtcgatgtcatacttgtttactcaggaataaacaatgaaaggaactttgttaggaccaaatccttcctttcagctctgatgttgcatgatcggggtgaagtttccatcaaatgcgggcacctcaacaggtagcattttgtaaatgcctcctcctacctaccctcctccttctccctcacaagattcttcattttcggtttgagaagacgttggggatcctgggagagggtccagtgtcgtcagggcagttgcaattgtttatgcgatgagcacagtcacagcgcttgcagaacaaaagcatcgaagagaggcgagcgccggtccacctcctgcaatcacaggcatcatttcaatggaaggcaaagaaggtgtaagctacaagcagaggcagcaaacgccctggttcctacattgctgctgctactattactgctgtggctgcgcctcctccaacacagccaaccaggctgcgtgcgagcccgggcagacgcctggccgcctccccaccctttcttccagccatccatctatccttccacccccggtccagggggccctactgtgtggcggactcagggccgggcacgcaacccgactcacagtccacggagttcgagagccttcccccttccccccgccccgggtgggtgcggccagtgggggatttcaccgccgaaaggtccagaaaacccaagcccagaatccgggcaagaggcgcagccggaggcggcccgacctgggcggcccgggagcgcgcgcctccgaggccgcgcaggttctccctgtctggcgctcaggtggcttctccgtccactccgccgctcccctccccgggccctcccctctccagcgagggtcgagtttgactgtggcgcgcggggaaggaggggctactagggatttgaaagtgcacgggctgcggagtggagctcgcatctgttcccgccgcccgcgagcggattaaatttctgcaaattcaaactgaatggggctttcttctgctgccttccagagggcgccggcagcccgccgcgcgcttctctccggcgggagcggccgcccagcgcacggctaggagcgatcgcgggagcccgacccaagcccgtgcgggccagacggcggcggcgaggcggaggctgcggaggcacccgggctcccggacccaggcacccggaccccgggacccaggcgccgccggaccgcgccccaccccgcgcgcccgagcagggcgactgtcattagcttcctggacgggacccggggcgggatcctggtgtcctgaaaggggcccgggcgaccctaagaggaagaacttttgggggcggggtccccggtcccgcgtcccctgggcagccgctattgtctacgcgcctcgctgggcggcgcggggggcgtgatcgcggcggccccgggctctgggtgcggagacccaggcggggctgggcccagggcggcggcgggagaagccggggaagccgaagagcctggggaggaggagctgcgagcgcgggagacgagcaggagccgcgcgggccgcggcgagcgcgatgccggcggcggcgggggacgggctcctgggggagccggcggcgcctgggggcggcggcggcgcggaggacgcggccaggcccgcggcggcctgcgagggaagtttcctgcctgcctgggtgagcggcgtgccccgcgagcggctccgcgacttccagcaccacaagcgcgtgggcaactacctcatcggcagcaggaagctgggcgagggctcctttgccaaggtgcgcgaggggctgcacgtgctgaccggggagaaggtgagtctcccgggcgccgtggggctggggcacaggggcgggagtcggcggccaggaccccgcggggagcactgcactgggagtcccagtgtgcagtcccgggccaagcgccttccccctccgcccggctttcctgttgggttaaaacgcgcgctcagcatctcgcagcctttcccgaaggcggcctgcggtccgctgcccgggggttgggggcttgggaggggacggccttgccccgggaagcgtcccgcgcggccgttctgctcgtggaagggcgccgcctggcgacactagcgcggggggcgggatggggcccctctgcccttcaggccggcaggggcggcggatccgtggcgaggcgggaaccagggctagaggaggtgggctcttatgtcggggggcggggggggcaggaaagctaacagccagcctctggggggagcttagagtctgatccccgtcctgggctctcggaggaggtgggagaaggctgagatcctgcattccttcccacctgtgggctccggcagctagggaatgttttttggcagctagggaatttttcgtgctcagaggagggtttttgcctccgccctccacttgtccatccctcaacctgtgctcctctctatccactcaaccctcccacccctgccccctcatcacccaccattctcatccccgccattctcatccccttctctccgttcccccagctcctctgtgccctccagcctcagggtgggagctgcagtgaagaccctgctactggcaggaacagaactacagatacctccccccagagactgggagatgccttcttatctttctagaagaggggaaaggaaaggggacctccgcgagaccaaaaggggcacctctccagccttgttggaagttagatggttgtgaacccttgccaggcgaggggcaggtaagatggaaggtgtaacttagagctgtgagaagaaacccaagagcttggtgactcgcttttgaggccgggtcaccccaggctggagctgcccgagctcagagccaatccaggctggagctgtcccaagctcctgtcatctcgggctcaagactgcccccaggctgggggtggctcaaacctggagggggaccagctcctttgtgtggtccgtgggtcagggaggcgtcagccgcaaggagggaaggcggagttcacttcccaaccgagcaggtggcctgggagccgagccctctgccttccgacctgggggcctctgcccagcctggggctgccctgtgaaacccctggtcacagggccaacctgcccttcctgcctgtctctagcctcaccccacctgtagttccctccccaccccatttcccctctttgtcttggagccttttgcctgtgaatgcaggtctccgtcacccttgtcattttccctgtgttccctacagccgttttgagtgaggcaccgctttattatgggtatgtggggatagagtgagtagtttttagaagtgcctcctgcctgaattcccatgcaaaaaaggagcgttcagtatgaacttgagtaagtcttcaaagaaaaaggaaaaacctccaaacctcgttctagtccgcaggagcgaggcacacttacactcctcgattcgattcgattcgattcgtagtgagctgtctgacttccacactgcgggtccgttcagggcgcgaggatgcggctaattagagtgagctctcttctcctggccctgtgtaaattcctgttggcactggcgatggaagtttattttcattggaaacgtataggattcaggctggttgtgcatatttcctctctaaacataacggaaagaagcgagtctttatgctcacaacgtcatggcaaacactgcaagtacattcttctcgcctgccctggtgcacagacttcttttctggcttccctccaccttgctgtgttgtgctgtgcctctggctctgtagcagcgcatttttgcaccataaaactcttggctttggctgaactgcctgggggtggattcagagctcagccagcgcttgggttctggagctctgtgctgggcccactgggaaccccgacatgcagggaattcttgcccaaataggattcacatgaagagactcgctgcttccccaggtgcccactccccttccctcccatcttatgtttcttaaatgatgaatctcacttcattgttgcaatgacaggagatgttaattggatgtaaaattattcccctggacccattggtggactgcgggtaaggatggtggttctttgggtggagaaggaggcaggggagagatgtctgtgttgaaaaacttggttttcccgggatgctcctccccagcggggagaatcagtgctccagggattgcgggcattgggagaaatctggattttagttcactcaattgctggctttaaagaaacaatggtgtcattcataacatttatctcccaaatccagcacctttaatgcttaactaatagatttgggttttagcagattgtggggattaaaatggttgtgtgtgtatgcttgactctgagaaagattgctaaattaaaatgagtcctcattcccactctagttttgggtattgcctaactaaggccaaaacaaagatgaccacagcctcaggctatttacaacctgaagttcttttaaaaggtgagctactaagatgattttggcctggggaaagtttcctccagtgagcagagctgaggaaaaggaggtcattaagcctccagtgtcccccactgtgggtgacccagggaggcctctctccctcattaattcctcttttcttggggtgtgtacattttggatttagaatttcacttttctcctgtcctatctatttattttttaaattttttataaagacaggggtctcactgtgttgctcaggctggtctccaactcctggcctcaagtgatcctcccaccttggcctcccaaagtgctacaattacagatgtgagccactgcacctggcccatccttttataaaggatccattccacattaggaggggaatgaagtcattaatactgtagtgagaagtactcccagcccacgtggagcgaaaggattcagggcagcttgtcttgggaaatcagtccatgaaaaagctgaaagagggcatagggaaacagaagttgagagggcaccccaagtttggcctgcttcatagctgcattctcaaactgtgagaattagttttgggtgatttgtgctaaaatctagggcattgctagttgaaggcatttggtatgggggtgtgtgtgtgtgtgtagcgtgttgtgtttcgacttggttacacttccaaaaagctttgggtgaaatccttcatggtttgctgggaatcactgtctgagtccagatgacaaagggagccagtttttcccaactttccttttaggtttcaatttgatctcatcaagaggctgcttttgccaccactgcctgtaggacaatcttttgcctgcttttcctctgaagttgtttgtttagaagccatttgaatctagatggctcttttactgcttgtaaaggaaagatggcttgcggctgagacctaattgtgtcctcctttgagttaatgcaatctctgttaatctggctttaaaaataaatagttcacttggccatgtgaaactcttaataggtaccttcacagtcagggctgagtgtctttgaccaaagttgatgattagaccagggaaaatgatcacaaaaccagattctgaaaagtaccactctctggctttgagacgaagagcaaagctgttgagcaacagtatggggtaatgactttgaaacacctggagtggttgtgcttgcagagcctggtattgatttgtgatacctatgagaggcgtggtctctggcacataacaagtgccccccgccctggcccccaaccagacagagtgacttgggggctgctgcatgatcagataatatcatctgtcgacagaataaggaaagtgacttacagaaaattgaagtgaggtccagaaacaggacagacgtggtggctcatgcctgtaatcccagcactttgggaggccaaggtgggtggatcacttgaggtcaggagttctagatcagcctggccaacatggtgaaaccctgtctctaataaaaatgcaaaaattagccaggtgtggtggtgcatacctgtaatcccagctactttggaggctgcagcaggagaatcgcttgaatgtgggaggtggaggttgcagtgagcctagattgtgccactgcactccagcctgggtgacagaatgagactccatctcaaaaaaaaaaaaaaaaaaaagagtttaagattttaaatttccataaacgttaaactttaaatgaagcaacttagaaaccacgtataatgtttctaatacagacattataaataatgtttgtaaggaatcagtaaaacaatggtcctttatcatcagcaatatatttggataattccttagaagtttggtttagtggctggacgcggtggctcatgcctgtaatcccagcactttgggaggccgaagtgggtggatcatttgaggtcaggagtttgagaccagcctggccaacatggagaaaccccatctctactaaaaacacaaaaattagctgggtgtggtggtgcacacctgtagtcccagctacttgggtggctgacacatgagaattgcttgaaccctggtgatggttcgtgatacctacaagaggcatggtctctggcacatgacaggttattgtgttttgtaaaaaattgataaaagttgaaaaaatatagttggaaaagctgaatcgagaaaagagtaggtgtatctcaggtattgagccagtgttgtaggcaggcaaactacagaacaagaacagacagtccatgccactgttaccttttttgtgattgagtctcactgagatacaaagttgagtacataaaatgattggttaagatgttgaaatatcttgttctaacccttggttaaagaataataagccggcttgtcacttccatcagaactatttttaggctaagagtaagggttgcctgcttactaagttgccagtaatcatgcttagagcatgacagtgccagatacctggagtgaaggagttactaaaaatacgatttactatgttttgcagagcaagaaatatgactaattttagaggtggccttttggcagatctgtttttagcaagtatttctgaaacaaacaggtgctaaatcctgtatttttgaagtgctagaagtttaggggtaatcgctctgaggaacaagaaatgcttagagaactggaaattcctattaatccttggcagggacttcttggcaagaaggaggcatttgcaaagcacctgcttggtgagccctgtgtgacaaggcagtgcctgtaatttcgaggattgcattctgcagttgcaggcggattcttttgaacttcctgccctgcctcatctttttgaagtacttgtgaatgatggaaattggcacgtagggcctggttcctagtgttcattgatacaggtcccacggacttcaaagggtgctttgagtcagcgcaacagtgcagaaacggtgcccacggagaggagtacaaccctacattttctctgcaggtgttgagtcacggctatagctacccgtgcataccaatccgactcaggtctgtgagactatagaattctgcatgctgccagctattggaggtcagcgcggcaatcatctgtcccagggtttatctgcccagaaggggtggggagtggcagccatgtgcccccgaagagagggacaggttggggtgttctccatgggaaggaggcttgggcacagggttatcatttgccttgggacatatattccctctgtcgattatttatggtaacggagagacctgctctcttggctaattgaaacccgtagataatccccaggccttatgttagctgatgggtgaaacttctttctctactcagccctggtctaagtactgacctgaattgaatttcacgctttctgataggaggtgccactgggtggtacgatgaccagcaggaaagagctagaaacacagggactgaatagtccccgaggagggggatgcctctgtgaattcgagacagctgttccctctcctccatcaccagcaccagcccagtgctacagtgttttacggtttttttcagggtgcccctcccgtgcacattcttgttagatgcctgcagcagccctggtggagggggtaacagccagcttgctggtgttcttgcctgccttgattacgtagaagggtgccctgagtagatcttctctctgacattctctatgagtttgctaggatggttctaacaaattaccacacactgtgtggcttcaacaacagaaatttattctgtcacagttctggaggctaggatccaaaaccaaggtgttggcagggccatgctccctctgcagccacagggagaatccttccttgcctcttactagcttccggtggtggccagcactctttggcattttctggcttatgactgcagcgctctgtctctgcgtctgtcttcacacagtgttcctccctctgagtgtctcttctgtctcttaatcttttcctatgtctctttataaggacaccagtcatgggatgtaggtctaccctaatccagtgttgcctcattttaactcgatgacatctacaaagtccctattttcaaagaagatcatatccacaggtaccaacgggacttgaaggtatcttttgggggagcatagttcaagctccagcacctttttagactgtcagtattgggttgtggcaagcggatcttgggaaggagatgaatgtgcttttagggattactctcagaactgacctctgcaagggaaggggcaaagcagcactgggcagagggagaagctgggctccaataccgctctcagccaaagcccctgcccatgccgtggtgagtgctggagctgagctggcccttcagagctgaccaacttgggttgagaggactgggatttatatttccgcatcggccagtccttgatgggggctgcccaggcaaggggcatggcctcgtacgggacagttgctgagggcggttcctggggagagctcacagctgatagcctgcagctgaggcagtcagttcttcagcactgacggggaatctgggggtgcagcccagcatttgctgtttactgaaagagacagggtcagagtccagggcttttcatctgagtccataccatatggaccgtagacaacgtgggcatcttttccatgcgcattttggatatgagtggtcatcatttccatgtgttggtatcaagtcctctcatctcgttaccttgaaatatacaaagtatggccaggcgtggtggctcacgcgtgtaatcccagcactttgggaggccgagggaggcagatcacctgaggtcaggagtttgagaccagcctggccaacatggtgaaaccctgtctctactaaaaatacaaaaaaattagccaagtgtgtgttcctgtaatcccagctactcgggaggctgaggcaggagagtcgcttgaaccaaggaggtggaggttgcagtgagccgagattgtgccactgcactccagcctgggtaacaagagcaaaaactccataacaacagcagcagcaacaacaacaacaacaacaacaaagaaatatacaaattattgctgctaaatatagtccccgtagcaaacattagcatttagtccttctatctatgtatgtttgtacccatgaaccagcttctcttcagcctgccctaccttgctgctcgactgtggtctctctccctgcaatgagggagcagccggcgtggcatctcattagcagattctatgtgccacacgctgggggattttctggcctcacatttctcttaggttagaatcatcagggctctgttgtgtttctcagtacttacaagattgaaagctcactttatatgtatgctctatgggttttttcctgagaactctggggcaactgagtgttgggccaagttgtgggccagcatgcctacttcagagacggtggcactttcctgggaagagaccccccctcccccatcactcgtgagtggtgggaaaagttgttgaaggagttgtgggaatttggatttttgatgagtagagtaacagtttgggacattctcatggacaaaaaaaactactcagggtagagccatctgttaacatcctcttagcactcttacggtggccactgtgccctagctatgcaacttctaatcactgggttctttttggtttttaatcatctttgtgttttcaagatgcatttggttaagttttggaattggtaatacagacacatggtctgaaattcaaaggttctgagagggtttgcagtgagaggtaactgcttcttatctgggctcttcagttcctggatcttctcgtgagaggtcactcctccttctagtccttgtgtatccctccagagataccctatatgcatagagacccacatacatatttgtaaatgcgtagttaggggcagatttttcttctttattgatacataatattttacatatttatggggtacatgtgagtgttccatgcatggagtgtgtaatgatcaagccagagtatcggcgtgtccatcacctaagtattcatttccacgggttggtattatatcaagtcctctgttctagttaccttgaaatatacaaagtattgctactaagtatagtcaccctaacagacattagaatttagttcttctatctatgtatgtttgtacccatgaaccagcttctcttcatccatccctcccacccaccagggcagatgtatttttaaactgtacatgctgttcattatcttgctttttcacttagcaatatgtcttgagcattcttccccatgactactacagaattgcctcactctttatgttaattagttattgcatagtagtcattgtgtggaagtatcatgttgacttaaccatcccttgttgatggacatttagggagtacataatttttttttttttgttattctcaaaccatacttcagtaaatatccatgaccatttgtcactttgtaaatgtgacccctcagtgtatctgaggggtaaattcctagtcttaggccaaaaggtatgtctattttaactgttgataagtattgccaaattgcctgccatagaggttggcaatttataatcacattgataacccttataatttataagggttcccaacttataaccacacccatctggtatgggagtgtttgcttttccacatgtcagccaacagggtactcattttgatctttgccaatcgagtgtattaaacatggtatcttgtcttatttattgtttctcttatttacatgggaattgagtatattttcataccttctcaactgtttgtacttcatttctgttcattgttcatgtccattcgccaattttcttttggggttttggcctttttcttattgatttataggagctctttatatattaaggaaattagtcgtctttgagtgatatattttgcagtgtctaccaccttccctcgctccccattattctttctctttttctttgtggttcttgccatttgcagaagttatttcttgggagttcatgaactagagaaggataattgataagttttggaggtctatggagccctatcaattgtgtgcatgtaaacatatttctgaggagagggtccatgggtttcgtcatactctaaatggagttatttacctctaaaatattaagagccactgctttgttgcccacccttgttggctctgctgactaaatggaagtctgcagattactgggctgagggtttgggtcaccttggtttgttaacaccggtgccagttgggctacagttgtagattatacacactcaggctaggcaggttggttctgcaaccatgaccctggagtaagcacccttgattctgccccgacccttaccatgcctggattgcaagggagaggcatgatactgtgtgggatggtctttggaaatctttgactcttgctggtttaagtaagacaactgtgagtccatgtcccatcatctcttcatgggaaaggtggtaccatttatggtggatggttgctatgatcagaatgtttgtgtcccccaaaattcttttgttgaaattcaaacctccagtgtgatggtatttggagatggggcctttgggaggtgatgagatctaccctcatgaatgggattagtgcccttataaaaggtgcctgactgaggttgcagtgaaaaaataaaaaaataaaaaaggccaggcatggtggctcacacctgtaatcccagactttgggagggcgaggtgggtggatcacttgaggtcaggagcttgacaccagcctgaccaacatggtgaaaccccatctctactgaaaatacaaaaattagccaggcgtggtggtgggcacctgtaatcccagctacttgggaggctgaggcaggagaatcacttgaacctgggaggtggaggttgcagtgagccaagatcatgacattgcactctagcctgggtgacaagagcaaaactctgtctcaaaaaaaaaataaataaataaagggtgcctaaaggagcttgtttgtccttccaccatatgaggactcagtgaaaaggtgccatttctatgagccagaaaacacgccctcatcagacactggatctgcaggtgtgttaggcttagacttcacagcctccagaactgtgagaaagacacgtctcttcttttttttttcttttttttgatggagtgtcactctttgtcggccaggctggggtgcagtggcaccctcttggctcactgcaacctctgccttctgggtcaagtgattctcctgtctcagcctcccgagtagctgggactacaggtgcgtgccaccacacccggctaatttttgtatttttagtagaaatggggttttgccttgttggtcaggctggtctcgaactcctgacctgaggtgatccacccgcctcagcctcccaaagtgctgggattacaggcacgagtcatcgcgcctggccaaattgtctgttctttataaggcatccagtctatggtattatggtactatgttacaccagcccaagctgactaagacagtggttgagaagaaagagaaagggggaatatcgagggaaatgaaaacctttcaaggagcaagagccattacgtaacttggacataaaatgcactaagacaggtattagtacattaatgcgtgtgtgtgacagtgcatgcgccttggcactcttcgaggggctctgtctatttgagatgccctctgaggagcagccttggtggggccgacaggcgggccctgctgttggaattcctgtggcctcggcctgacgaccgtctctgaatgccctgtcccctgtcactctctgccccttcactctgctttgtccctcctcaccacctggagtggtttgctagagctgccataagacagcaccacagacccgggggctggaatagcaaggccttactgtctctcattctggaggctggaagtccaaaatcaaggtgttggcagggtgggtccttctgaggcttgtgcaggatggatctgttccatgcccctgtcctcggcttatccatggctgtcttcttcctgtgtctctttacatcgtctgccctccacgtgtgtctgtctctctgtccaaatgttcccttttgtatttttttatttttttgatacagagacttgctctgttgcccaggctgttgtgtagtggcacaatcttggctcactgcaatctctgcctcccaggttcaagcgattttcctgcctcagcctcctgagtagctgggatgacaggcacgcgccaccatacccacctaatttttgtatttttagtaaagaccatttcaccacgttgatcaagctggtcttgaactcctgacctcgtgatccacccgtctcagcctcccaaaatgctgggattacagactatagacgtgagccaccacgcttggcctatgttcccttttgataaggacaccagttcaaattggatcagggcccaccttaatgacctcactttaacttgattacttctctaaagacctcatattcagggggctaggcgcagtggctcacgcctataatcttagctctttgggaagctgaggcaggcagatcacctgaggtcaggagtttgagaccagtctggccaacacagtgaaaccctgtctctatgaaaaatacaaaaattatctgggtgtggtggtgcacacctgtaaatccagctactcgggaagctgaggcatgagaatcacatgaacctggctgggaggcggacgttgcagcgagccgagattgcgccattgtactccaaactgggagacagaatgagactgtctcaaaaaaaaaaaaaaagacccctcatattcaaataaagtactgaggtactggggttaggactccaacagatgaattctggggggacataattaaacctttaacatcacctgatcccatggaatatatttagagttgatgtgtttgtctccccactagagtgtaagccccatgaggaagagaccactgctctattccccgtgccaagaatagtttctggtacagagaatatgctcagaaaatactttttttttttttgagacagttccgctcttgttgcccaggctggatcttggctcactgcaacctccgcctcccgggttcaagcgattctcctgcttcagcctctcgagtagctgagattacaggtgcacaccaccacgcccagctaatttttgtatttttagtagaaacggagtcaggctggtcaggctggtctcgaactcctgacctcaggtgatccacctgccttggcctcccaaagtgctgggtggcatgagccaccgtgcccggccagaaaatattttatgaatggatccaagcatggtttgatcttcccaagacatgtggacagccttctagggggtaatgtccaagttggcaggctctggttctgcaagcgctgtatgtttctctcattccttgctgctctgggtgtgcctgtctgggtgatgactatgttgaatgggttgtctggctggtgctctgtagaaaaatcctggcccctgaacagctgtgctttctgcggggatttagttaggcacctaggtatctgagtgacaggtgactaaccagaaccagacagtattttgcagtgtcaggggatgttaacggaccctctctctttcctgagaaaatgtagcaacactgcaacagatgggagaagttgctatttgcaaacatacattttattttggatgtttcccatggagatatatgtaggtttggagtctgtctctttgactgtaatttttttataagtttattagtctcctaagccacattcctgccaaaacattttgcaatcctgcttgcttctcttgcccattttctgagccatttgattcattctgggctccctccctgcatcaccactgccattttagtcctctttttgagttcttgttgtcttatgtccaaccccaaggctttttggtaagtcgtcaggccatctttctgcctttcttcagacgctcttgtatgtgacgctcctctctttgtcaccgtcggctctttgccggggctctgtgtgtagcagcttgaaagcgtgcagcagtagtgggtgacccgtgaacacagagcgtggtgctaagagataaaggaacagtggatgttgtaaccgccttcggggagcctcgccagctctgtttagggatgatagaatgaagtttggattcttagcgattcccttgtctacctggagcagaacacgggtaggcaggttatgattgcataaccttccaaatcagtaaaaacctgcaggaaagaaatgggtacatggtttttgctttgatcatgaggaggtcatactgatcacgaaaataatgaacatttgtggatctcgtaccatctgctgggccatgtcttggatgctttgctgcatgagacaacttactcttcatagtagccttttgtggtaggtactgttgtcctgattttgcagattaagatgaccagaatcttggtttgcccaggactctcttaagtttaatgtaggaagtcttggatttgaggaagcccctcagataatgccaaaaccacattcacccaggaaaatatttcatcagagtgtttggagtccaaactgcaggtttccgaataacagtattaataagcagccaatcaggtcatgaatgagtgaagaagtaaagcccaaagccctgggcgttactgggatgcttttgttggtaataataatgtccctgtgtgctcccagggactgagaggtgcttttctcacatatgtagtacagatctaccatctttatgggttcacatgagatgaggagcttgagctattaataatatgtgtgttaggctggacgcagtgctcacgcctgtattcccagcactttgggaggccgaggcgggcagatcacttgaggtcgggagtttgagaccagactgaccaacatggtgaaaccctgtttctactgaaaatacaaaattagccaggcgtgcatggtggcgcatgcctgtaatcccagccactcgggaggctgaggcaggagaatcgcttgaacccaggaggcggaggttatggtgagccaagattgtgccattgtactccagcctgggcaacaagagtgaaactccatctcaaaacaaaaacaaaaacaaacaaacaaaaaaatgcaaaaaaaaagggggttgtatgtgcacacacaaatgtatgtgtgtatatatatataaatgcatatacacagatgtatatgtgtattatatataacattaaatataaattatataatactatgctaaatacatacacgtttttgttagcagacttcctcaatgaaggaagcagtggggactggtagctctctgagtagctctggttcgcatcagtctaactctagtagtacttctcttttgcgctgggggctgaaaaatctactggaggggagagaggtttttgaatcacatcgtgaagctggaagtgcattcttacgtcacacagtgaacagtcccttccagtctcctcgttaaaccatcctcctacgagaatgaacacagattacttattaaaaacaaaacaaaatacccagtgcttttgccttattatgctgacgatttggaggcagaccagctttcccaagccattgcttagtccccggttgggctgagaaaggacatgagaggcaaatggaatgaggaagtgcctcaggtgaaaaggaagcttagggaaagttagctgtggagtctgagatcagaatattttaacattttatctgagccctactttagtgaaaccaaatggataaagataagtgttatcacttatataatctggtttttagttggaattactgctgctctgatgtagctttctcagtgcattcttgtttccaggttaaaaatttaattagagaaactagtcgatgactcagttctcagttgaacatttacatttaataatactaataaagaaaacttgttttgaaaacacatctccaggttttcatagtgtcattcccatagggtgacattttattctattaaaagctaacatttgtgagaagtagttgcaatttcaaggccaatttgacataataaaacttgaatttctctctggagggaaggtgctggatggctattttactcccacctaatttattactctgagatgctttttccaagatcaagaatgagctttttatcataaaggccattaaagcagctgagaaagtacctgagaatgtgcggggtaacagatagtttctttccagtgttcagacttagaattatgtcctccagatttcaaagggacatattactcaacagtgcatttatttttaaaaagtctaatataaatcagtgttttttctatgatcaactataaatattttaaaaataatatatttttaagtatttttgaccaagcattaagaattttaaaattctttaaatcagttaagtcacaggtatattccagaatagttgagatttttaacagatcaaaagaagtcttgggctcatatttgatagttgccatctaaatcatggccacttatacatacttttttattgtcaactttgccacttgttactatactaatcacattgcattatccattctctctgttttagataccttttttttttttgagacagagtctcgctctgttgctcaggctggagtgcaacggcacagtctcggctcgctgcaacctctgtctcccgggttcaagcgattctcctgcatcaggcttccaagtagctggtattacaggcacccacctccgtgcccagctaatttttgtatttttagtagagacgggatttcaccatgttggtcaggctggtctcgaactcctgacctcaggtgatccactctgccttggcctcccaaagtgctgggattacaggcatgagccaccgcgcctggccggtaaatattcttttaaagtttgatttttggtgatgcatagcattccattatttggagttgctgtaatttttaaatccagttcccaattgttggacattgaggttgttacaaaattttccctggatacatgatactgctgttgctatccttgtatgttcatctctgagtcattccttaacataaatacttggaaggcttttgacatattgccacattgcacttcagaaaggttgtaccaagtgacacaacagatatgaaagtgactttttaactgagcattttgataattaggctaatcataatttgtgtacttgattgaaaatgtgtttcttcttttatgaactgttactagtaattttcccctatctttctcctgtttatcttattggtttatagaaactcttttcagattacagatattagctttttaatcttttgtttaaaaaaaaaaaaactttagacaaattaaatttgacggtttaattagcaaagaatgatttgagaaccgagcaccccccagccctggcccccaaccagacaaaatggaagtgaggtacagaaacaggctggatgtggtggctcatgcctgtaatcccagcactttgggaggccgaggtgggtggatcacttgaggtcaggagtttgagaccagcctggccaatgtggcaaaaccctgtctctactaaaaatacaaaaattagctgggcgtggtggcccacccctgcaatcccagctacttgggtggctgaggcacaagaatagcttgaacccaggaggcggaggttgcagtgagtggagattgcgccactgcactccagcctgggcgacagagtgagactgtgtctcaaacaaacaaacaaaaagaaaagaaacagctggattgcttatagcttggcatttgccttatttgaacatacgaacacacccgtgattggcccagactctgactggtacaagagcaggttacatttaataatactgttaaatgtattattgcacatctgtttacacatcctgttaggatcctgtttacacatacaagtgaggttacagttcactatgtgcagagaaaccattaggctgaacttaaaatatgtaagaaagcatctttagctaaactttatttaacactttgttatgttgcgaatattgtctcccaggtgatcatttgccttttgattcatcttatggtgcttttattttaggaagggggcaaaggcacatggaaattttgtgttttgtctaaccaatccagtagtcttttatctttagttttctcttattgcttttatgcataagtaaactagagggcttgttgttggttttgtcttataaatgatcagtgggtccagtgtttcatagttgtctgcagaaaaatctttgcattgggtagggatatttgactatatattctaatccgttacataatgatttaacctgttggtgttatgtactaaagcacaggctgtgggggctgacagcttgggactcctatctgctttctgctacttggtatctgtgtgatcttgggcacagtgttcaaaaactctaaacttcagcttctgtatctgcaaaatggtgacaaagatacctcatggtattcaatgagaatttggttaaaaaaaaaaaaaaatatatatatatatatatagagagagagagagagagagagagagagagtgtgtgtgtgtgtgtgtgtgtacagcacgtagcctgaaaatacagtcattattgtgttagtcaagaaaaaagtggccagacgtggtggctcacacctgtaatcccagcactttgggaggccgaggtgggcagatcacctgagatcaggagttcaagaccagcttggccaacatggtgagacctctgcctctataagaaaataccaaaaaattagccaagcctggtggcgcatgcctgtagtcccagctacttgggaggctgaggcaggagaatcacttgaacccaggaggcggaggttgcagtgagccgagattgcgccactgctctttaacctgggcaaaagagccagactctctctgaaaaaaaaaaaaaaaaaaggaaagaaagaaaaaaaaagaaatggtagttggttgttctcttcatttagactttcatagttatatttccgccttaaaagtatgtattatttatggtcttttagatagtaagaaacagatacccactcagtttatcatagataacggcattttattttaaggataaagggaggtgaggaaaaagatgatggggacgcctcttccgtcaacacctccctgaggaccgcgatgcctctctggatgtctgcattcctgggattccactttcctcttgcccacctctgccgcagacctccctttcttggcagcttctgtggttccttgggcgcatcctgccattcaccctgccccctgcctcaaggcttctcactattcctggcttctctgcctcctcctgtgtttcactttttgctctttctggatgtaggggagggaaaaatgtcttccctccacccgtctacttatttggttgggctacaaattaaatcgacataagacagagtagcaggaggaaaaccacatttaaggacatcgtatgcatgggagtcccacagaatatgagactccaagaagggccaggtcatggaagcttctacagcaacccgagctacagaaaagaataggggcttggggctttgggggtggtggcaatccgttctgggaggatgaggggaaggaatgtacggtggtgaataaagcttgtcttgttatgcagataaaagtcttccaggtaataaaaagttacctggagcaactcttttcccgatacatgaattttctttatagatattatttgcaaaaggacagcttttcggagctgcttctttgtttgcagtttctcaggataagcagctcaaactatgccaaagaactctaattggagtgtcatgttctggtctcctatagtcatgtttcggggtggttggtgtgtcttgagccccaacatgggtattactgggttgtcttgtatttctgggattgatgacatcgtggtagaagtgtgatactggaatccttactggcctcacctccttgtcacctttttgccactgagcgtcctttaacagcagagaatccttttcacagtggaataaagaatgctatttatagatgattctacacgagttaccagattagtatggtttgagaaagtttgtgggacaattaattctccatgtttttgatcaggtaggcaacacctgcctcaacactcaggaaaacatgttactgcctttaagggttatactttctcccatgtttgtagttgtagggatagcttaatgcatttttttcactgaccctttgctagaagttctgtcatttccaatgtgcatcgaaggcctctttagcttccgggactgggttgagaattttgtcttggattcttattgccaaaatctctgggtttccaattcctgtggtttctcccttcttccccgaggctgcgttattcttgtaccttttcaactgcttttggctgccagttgtcctctggtgtgagaatagagtattgattgcttcctgttgcctgtgggacaggaatgcttcttgaattagagctaattttggagtttaaagtattaaatgtcaaatttgaaagaaagcacatctaagacctctttgttgtggaagcgaaggtcatcccagggcctaggggaagggaaaggaagaaagaaaagagaaaggagaaaatagctgatgacttctccctcttccagatcattccctctacactcatggaatgctctttccattttcgtaaaatccatttttagactcagaattctgcatctcaagccatttgccaggtgtactgtgatgtcagaatactcactgctggggaaatttcccagttgtaactagcttaaaaaataaaacaaacgttacctttacttggagatgatcatttgttttgtcattcaaacacttaatggtggccctttttatgcagagctgctggtaacctgtatgggcttttgtacacattggaaaagctgtgccttgccagaccaattagaaaaagacatcccctctgggtgaaccaattaaaaaaaagcacttcctcaagtgggccaattagaaaaggtgtcccctctgggcagcccagttggacaaaggcttcctgtttgaatggatgcagctgcaaggtgcatggtttagcaagcagacagcattgcgggaggaaatataccctttgctctagggcacagagttggcaagccaagtggggtctggatttcttcccccaaatggccccctccattgggtgcttttgtctgaggcaccaaatgcaccgcgaacaggctcaacaatctgatctgcacccagtagttagagctaagctgtgaatcacaaacacggaactcatgttattacagtggaaaaggccatgtttcttccaacagtgactgattaagtgtcccaggattttagcgaatctcaggtaaaaatctgcagaatcagtcctggtctctttctttggcaaagtctgcttcgttgcttgttctgtaagagaaagagaagcaaggtgaagaatttggatgataaataaattcagtgtgtttatgtcactcaaggcccaggagacacaagacatgctctggcatatgtaacaattagggtcttgggggaatgcccttcacgagacctgtgaactttgtgtctcctgagtcatcattcaacctgcttcaggggcccagggctctcagacttcctgtgtgttaagagctgaagcagctgttgaactagggtctcagagactccagtctgcaaattcgaagagaaaaattctccccagtgttgattacttatcagcccggttcctttcttggatggggaaatggtgtgacaatttaataacgggcctgtgacaattacatgcaagtggagagaatgaaaaaccagccttggaacagagatttttcttttctgggaatggtacgtggtggttttggctttctctatgtgtaatgggagaggcccatccatctctgtgtgacagaggaaaatttcagcattaggagagtaacttctgatttatcacaaacagctgggtgggccatgcctcactggtgcccaggcttaagcagcctttgaaatagagttgctcagtgtggcttctgcatctgaaagggccagtgagctgctgtgtgtttcacagtggttgctgagctcttgtcatcctgatcacccctggtagagggtcagtgtgaaggagggcattaccttgaacctgacaagtcttgtatctgtcaaggtgtttgctatgggctgaattatgacccccaaccacaaattcatatgttgaagtcctaacccccagtatctcagaaggtgactgcatttggagataggatcataaagaggtaactaaggcgaaatgaggttatctggataggccttaatccaatgtagctggtatgcctagaagaagaggaaatttggacacagatgtgcgcacacacagagagagactgcacgaaggccacagtgagaaggtggccattcacacgccaaggagaagggcctcaggaggaagcaaccctgctgacactttgatctcagactttgggcctccagaactgtgagaaaatacagttctgttgttggagctgcccagtctataatcctttgttttggcagcccgggccaactaatacactcttcatacacctccatttgctgagtgtcccagaagctaaggtcggcttcaggaatcatgccgggaaacttcacctgattcacgagaccactttctaatgggatcctcctcttcagtaactttttcctctgggaaggaacctggggtttctctctcttacttcttgcctcactaaactctgttctgtaacaaatcacattctgtgcagataccacgatacctggaaacaatctcctccttgagtaaggaaatcaataatattcactggattcctgacttgtatggtgttgtgtgctgtctcattccatgttgggtcaagaaaaaaacaaacaaacaaacaaaaacaagaaaatgttgtccctctagtggtttcttggtttccctggcatatttctacaaaacaccgtcaaaagaagaaggtgtttgaggttgctattagaatttcttcatggacacatataaatgtatgaaattattaggatggtccataaagctctttatattgtttgtaggatattgacacatgacttgtgattactttgcgtatgatttgtgtgaacccaaaagattattctctgtagctcttaaaatgttcactctttaggaacactcttaaagtgatcaactaaaaaatgttgttgctagtagcatgatgtcatgtggattagttgcctatggctaccataacaaagtactataaactgtgtggcttagggccaggcgcggtggctcacacctgtaatcccagcactttgggaggccaaggcaggtggattgcttgagctcaggggtttgagacaagcctgggcaacatggggagaccctgtgtctacaaaaatacaaaaattacccagaagtggtggcgaaggcctgtagtcccagctacttttgggaggctgaagtgggaggatcgcttgagcctaggaggtggaggctgcggtgagccgagatcacaccactcactccagctgggttgacagagcaagaccctgtctcaaagaaaccaaaacaaaaaaaattagcaacaacaacaaaaaactgtgtggcttcaacaatggaaatttattgtctcattctggaggccagaagtctaagatcaaggtgagttggttccctccgagggctgcaaggaaaggctctttccaggcctgtcttccagcctctgatagccccaggcattcctggcttgaagggcatcctccctctgtcttcacatcatcttccctctgtgcatgtctgcctcttgttcaaattttccatttaataaagacacaatcatgttggattagggcccaccataatgacctcatcttaactggatcatctgcaaagactctatttccaaataaggccacattcacagatgctgggagttaggactccagcatcttttgcggggacagaattgactcatgacaccatgttattgtttttcttatcccatctcattagccgcaaaaaggtctttggaccctggaagcaaagagcaagagacaggcaaaggccaagaggacagtgaaggaggtggggtggtcagggctaaaaggtagactgccctgggcattgatgtttcttgggctttgggtggagggtgctgcctggaccttctaggtagcttcattgcctctgttccaccatgttctatctttccgagatgctcacctcctcccctgccctgggatgctcatcattgttaagtgcacttgggcttatggttcattggcagttctcttggagagagaaagagggaggctacgtggagtagggatgcattgcagagatacgacagttatgctgacattctgttaaggaagaccttagactctggaaacagacttgaggtgcaagaccccccgctggtctggcttccaggagaaggccgagaggtgagtcacacagggcagtatttctcagtcttattttttaatccatatactctgtagtgaaaccccacctgggcaaaaccattttatgttttgtgattaccattaggacaagctttatactttgtgggtatttatttaatttatttttgagacgtagtttcgctcttgttgcccaggctgaagtgcaatggcgcgatctcggctcactgcaacctccgcctcccagtttcaagtgattctcttgcctcagcctcccgagtagctgggactataggcatccgccaccatgcctggctaattttttgtatttttagtagagacagggtttcaccatgttggccaggctggtctcaaactcctggcgtcaagtgatctgcccacctcggcttcccaaagtgctgggattacaagcatgagccaccacgcccggccgtggattttttattagggcaaaaataggtggactgaatgtgcctttttcagctcacttttcttctcgaccctggaggactctcccgtcttttggtcacccctatggagaggccctgcattgagctttgttgtggagtggggtggaacagggcaggagtggggtccaagcttctggaagtgtaaggagagaggatgattaatgtcaggccagctctgcttggaatgagtttgagaagtttgagagaaagggcagtgtctactgatgctagaagactgatatgaaagcaaagcttttaatatccacaaagcatccgatcaatatgcctaaatagtttgttaggctcctcttaagaaataccatctgtgagcttattctcttttatggtttaacgttacaaacacttgtaatgtatgttatcgtggaaactgaatgatgataagctgctcttaagttcccaccctcttcccttgttctcggtaggtttatgagtataaaaggggaaaaactcattctgcacttggtgccatggaggaaatgatttaacaagtcgaggctggcaacgacttcctgctgcactgattttacttagatcttcccttttaacgttctctattagtttcctgggctgccataacaaagtaccataaactgggtagtgtcaaacaacagaaatttattatctcacagttctggaggccagaagtatgaaatcaaggcgttggcagagccatgctctccctgaatgctgtaggggaggagaatcttcttttcttcctagctctggtggttgcctgcagtctttggcctgctttggcttgtagatgcctcactccagtctctgcctgcaaattcgcgtgacctttgctgtgtgtgtgtgtctgtgtttcctcttgttgtaaagacatcagctctatgggattagggacccatcctactccactatgatcttatcttgactaattacatctgcaatgaccccatcttcaaataaggtcacattctgaggtactggtggttaggacttcaatgtatctttatgggaaacccaatttaacctataatgtgttctaaaccaaactcgttgcctttgccactgaccaatctgcctcttcttcattccctgctactcctgctcagcaccatcttggttcctccatcttctcagtcccttttgggttattcagctcctgtaagttacacctctggctgctgtgtgttttttttttttagacagagtttcactcttgtcacccaggctggagttcagtggtgcgttcttggctcactacaacctctgcctcccaggttcaagcaattctcctgcctcagcctcccacgtagctgggattacaggtgcctatcaccatgcctagctaatttctttttaaatggagacggagtttcaccatgttggccaggttggtcttgaactcctgacctcaagtgatccaccctccttgggctcccaaagtgctgggattacaggcatgagccactgctcccagcctctggctgctttttgatttttatctcctactgagtccctttgacacagtctagtttaatcctcgttcattctccccatcccctgttcctcgcagcataatccatcctaattgcctagaaatgaactctaatgagtccacaaactctccaggcccaccctcctagctccttccagccccactgaaatgccacgttagttcttcctggagcctgccctcctctgcccagctggaggtagtttctccccgctctttgttctgtctccatgtcacctctcttactccatgcaacatcttgagcacaagcaagcgtgtggtagctgcctcccaggttgcaggattatttaggctagaaccaggtcttagttactgaaacacacacacacacacacacacacacacacacaaactctactgtgctcgtcatgatttttcacgaatagtgggtactttgacagactcggtagaatgcaggtctccatgtggaagctctggctacaattctgaggttttgtcatggtccaaaggtctcctcttcgagtctggctctcttaacaacagcactctactacagagccctgcgcgtgcagtgatacctgagttaatcagtactctggaagtaagcctttatccagagtcagccttgggtttatcgtgtttattgtttaactttctgatggactggacacggagtggttgggaagaatttcccagggtagtttcagtatggatcagatgcctgtagcccttgagtactgcattcgtttcctggggctgccatgacaaagtgtccacagaccttagaacaacggaaactgtctcacggtaacccagaaggagctggaagttcaaaatcaagttgcaccctctgagggctttggggaagggtctcttccaggcccctctcccagcttctggcacttccgtggctactggcagcacgactccagccttcccatggcattctctgtgtgtctctgtgtccaaatttctcctttttataaggacgccagtcatattggattagggtacacacaaataatgtcgtcttaattaattacatctgcaatgacctgatttccaaacaaggtcaccttctgagctgctgggggttaggacttcagcatgaaatttgttgggggacacataacaaacacataacaggttctcagcttgagttcttctgtagagtctggggtgtgtctgctgggtgacttggttggtcactgaggtttgcagagggtagagatacaccctcagtggtgagtagaagggtgtgaccatcttcacctgtactgtccccctctaggccctgggaaagcaactcccggtttgtacacctggcttttaatgcattgccaggagttctctgatgtggaggccttggcttggtggcaggaatgatgagcttgggctgagcaggcagcctgtgtcacctctgcttgacaggccacagagattggcaggccgcctcagagggagctttgaagtctcaaagttaaggacccagggccagtcacatctgtatttagctaatgtttaaacttgtagctcacctgttctgtttctcacctatactgtttctccctctgcaaactaaactatgatgctcaggtgtagtaaggctacttctgtatgccaggagagcataggttgtcttgcgaggatgtccatggtgtagagatatgggaattatgcttttaaagtgacaaatttggagagtaagatgtttttgtttttctttggtcacattgaactactacctgatttaggtgttcacaatgatcaaataacccactgggttatttgaggcccagctcaggcctcaaccaggtcataccacccctctagatggcaaggggctacttagctgtcggttgagagtcacatccatgcctgaccatgtcccagctggacagactgtgggcaagtttcccctctgtaaaaaggcataggtgtagaccacagtcatgaagccatataaacctccaactgggactagtttcattgaataagcacttgataagcaagaccctgcaaaacactgtacatgcttcatgtaactcccacaagccctacgaggaagaatatgccattatttcccctttttacagaggggaaacttttggttcacacagattaagaaagttggccacggccgggcgcggtggctcacacctgtaatcccagcactttgggaggccaaggcaggtggatcacctgaggttgggagttcgagagcagcctgaccaacatggagaaaccccatctctactaaacatacaaaattagccaggcgtggtggcgcatgcctggaatcccagctactcaggaggctgaggcaggagaatcacttgaacctgggagacggaggttgcggtgagccaagatcgtgccattgcactccagcctgggcaacaaaagcaaaactctatctccaaaaaaaaaaatcttcttcctcgtagggcttgtgggagttacatgaagcatgtatagtgtttcgtagggtcttgctggtcaagtgcttattcaatgaaactagtcccagttggaggtttatatggcttcatgctgtggtccacacataggcctttttgttttcacaccatgaaatttacagagaaatggcgattgtccaaagagctcatcaattgcatgcttattgacagctaaactagttaatttaggccactaaatggatctcccagccattggaatatttactaagcttaagttaatcagacagttgcctacatttatttattgattttctagaccatggagatccgccctgtgtgctgcttaattataagctctcacactattaatcttttctttatgtaatgataaaatgtgtttaatataatgagattaacactactgatccacttttgaaaatgtgatcatgatcaaagtgtctaattttactttttttttctcggtgcgggagagaggtggaatttgcaaccaataaatcttgattcgatgaaagccacattaaactctttctaacatgattttaacataacaaagctccattaatgttgatgaaagcaatggataacttatgcttgacccaaattcagagcatggggcccagtgggatagaaaatcataaactgagaataataactccaatcacagctacccctccaccacaaatcaaaaaagatatctcagaatttaaaatgtattttcataatgattagttcttgtaagtggaaaacatccctttgaagtcgatgatattctgctctctagaaataattcttttattgaacttgactatataaatattcatggtgctgcgtgtgtatatttcatattgtttcattagttactttttagtcattggaatagtaaaaaatgttcgctaggtactaaaaatactgtggagttgaaaataattttcattcttggccacacagattaatttactcttgccaaaaaaaaaattacctttacagctaggcggttgactaaatgatgaataagaagtctatattttaaaagaattttgaaagttagtgtcctggatagaacagaaatgtttgtgtttcagtcttggaattgtctgtgtgactctaggcaagtccccaaacctctattaaataaaatttacccctccgttaacggaaacaaaagtaaaacccccaattgttccttcagtgatcacagtttcaaaaggactgtgctatttctgcatgttcacaagatgagacccagaagattttggagaaagtaagaggaatgttttaagttagtttttctaaaacgtcctcaggttgtatctaatgggatcaacagtattggttgaaagtcattagtttcttctttttgttttctgatagctgatttagatgatgttactcttcagtcgtgatgctgtttaagaaaactaaacaaaatcaactaaagaaatagcccacttgctggtagctgtgaatttctcatccagtagttacagttactgcaagagtttaagtacctcttcatggaggtattttgagttccccttttcctgtaagctaagcaattagtctcggttctccatctagtatacaaatcatggctattcaccacaaaagattggccttttatgttcaaatattgaaatcccaggagattttgacatgtattttgcttcaggaaatctttttgggtctactcttcgggccccttctgtctctgtttacatgttgctaaactttaaatggttgaacaaatggtaaagagtagaaactacatttatctgatgtttcctaaactttatgcctcactgaaagcagctgagaaaatgaaaatccaaggtgactaatgcaaataaaaagatggtgacctctttttgcaaagataagcaagaagtagagatgtctccaaagatgccagcgataggcttatttgcagaaaagttaatagcttaaaatcgtatttagaaagtcataagctgggaaaacatgtgacagagagaaaaggaactcaaagtatcaggtttgcttggagatgtcttgggattgttggcgtttccttgagtcatgttgcttcctctccggagtttccgtgggtcttccgtgttttagatctatttcttttttccttagttctagaattcgtgataaattttactggtgttatgggctgaattgtgtcccacccccaaattcacatgttgaagccttaactcctagtaccatagaatgtgattcgatttggagatagtctttaaacagatagttgagcgggatgtggtggctcatgcctgtaatcctagcactttgggaggccaaggtgaacggatcacctgaggtcaggagtttgagaccagcctggcctcaaaccctgtctgtactaaaaatagtagccagcacggtggtgcacacctgtaatcccagctactcgggaggctgagatgggagaattgcttgaacccgggaggcagaggttgcagtgagccaagattgcaccactgcactccagcctgggcaacagagtgagactgtgtctaaaaaaaaaaaaaagaggtagttgagttaaagtgaggtcctgtgggtgggcctcgatccaatctaattggtgtctttataagaagaggaaatttggacacggacacatagggaagaccgcatgaagacacaaggagatgataaatggggtaataggaaatagattattagttaatttcacctgttactttttaaagccacctacaagcctaggagagaggctccagacgtaaccagtcctgctcacaccttgatctcagacttgtatcctttcaaaattgtaagacagtaagccacacagtcggtgatactttgttgtgacagccctagcaaacaaacacactgggagatagtaattaaaatggttgaaagagcaaaatgtattgaaaaagaaaaaggagtcaaggccggcatcttatgatctccatgtcgttcttcccaccatgtgcacacgtgtgtgcaaacctgcgcccacctcccactgagctccctgttatctgcttatggattcctggcccttcctgagagccattatctgctgtcagtggaagcagagcattcattattcccagccagtgcagggaggccaggaggatttatggagtcattgcaggaacacaaattctgctttgtacagacggacaccataaacgcacatgaataaatcagggcagagtggaaaaaagacctacttttccctttctcatgaacacaggcatgggggctagccccgatgtttagtgtgtgatttagtgggggaggaaggaagcctcgtgttctcatagcatagagaagccatctgcagaggtttattgaggacctcctgtgaatgggtcactagcgggcctggggctgggaggagctgtgataaggattcctgtgttcagtttagtgtacgactgttattttaatttttttttttcctggagctgctgtgtctctccctcccctgggtttttgcactgctgcccctgccatgcactggcttgctttgatatttccccttagcatcatctgcatctattagctatatcttaattccactgtgttgttattattgttggctcagttttagctacaattaatggatggtcactatgtgcaagcactttccattatttaccttggccaccattattatccccggcttactgatgaatagtcggaggcataccgaggttaagttttttgcctaggatttctcagtgctgggactctgacctcagctgggttccaaaaggcatgatttaattctcattacaaatgtgggtgactggtaatctcatatgcactttgcagatgagaaaacagagcatttcttccttccttcattctccagattttgtggttgccgttgttgtttgtttaattgtttttgagagagaatctcgctctgtcgcccaggctggaatgcagtggcacgatctcagctcactgcaacctctgcctcccgggctcaggctcctgcctcagcctcccaagtagctgggaccacagatgtgtgccatcataaatggctaatgtttgtattttttgtagagatggagcttcaccatgttgcccaggctggtcttgaactcctgggctcaagcgatccgcctacctcagcctcctaaagtgctgggattacaggtgtaagccactgcacctggcccagactttgtgttttgagtgctaggtctcaggcaggcagtcagctggtccgtgggctcagagggtgtgtggtttgcccaaagccagacagccagaacttccctgtcccttacagttgcctctcaccacatgtagctgttgaacacttgaaatgtgcctggtctggcccggtgtggtggctcacacctgtaatcccagcactttgggaggccaaggtgggtggatcacctgaggtcaggagttcgagaccagcctggccaacatggtgaagctccggctctactaaaaatagaaaaattagcctggtgtggtggcaggcacctgtaatcccagctacttgggaggctgaggcaggagaatttctttcttgggaggcagaggttgaagtgagctgagatctcgtcattgcactccagcctgggcaacaagagtgaaactccatctcaaaaacaaacaaacagaaaaaatgtgctttgtccgaactgagatgtgctccaattgtaaaacacacaccagatctcaagacgtcatagtatgaaaaaaaaatgcaaaatatctccttaagaatttcaaaatattggtcacatgctgagatgataatattttagataaatggggttataggaaatagagtgttagttaatttcacctgtgtccttttacgtactgtggctactaggaaatgtaacatgacttatgtggcttacagatcttggttggatggcactggacatgtggctgaggcgaggatgtctcctgtggattctcttgtgccattctgagattgctcagaggtaccggttgttccctctgaaccaagagtgatagtgcccaggtggggaccattgatgagttggacatgtgagaagcagggagccagcacggggcatacctggaagatataaaaagtagagaggagtcacaaccacgtgaacatatttcacacctctgatctgtgcacttaaaagtggtgaggatgggccgggcgtgctggctcacacctgtaatcccagcactctgggaggccgaggcaggcggatcacttgaggtcaggagtttgagaccagcctggccaacatggagaaaccttgtctctactaaaaatacaaaaattagccaggcgtggtggtgggcacctgtagtcccagctactagggaggctgaggtgggaggatcacttgaacccgggagacggaggttgcagtgagctgagatcgcgccactgcaactccagcctgggtgacagagcgagtctccatctcaaaagaaaaaaaaaatggtgaggacagtaacttttatttaggtgtttttaccgcaataaaaaaattttttttaaatgaacaaaaacttaaggagtatgtgtctcactatgactattgtataaaagcatttaaagaatgaaaattttatttgaccataggcaattgggctaaacaaaaattgatagaatgtaagctagtcaaaataaactttgttccaagaaaaaaaaagtggagagggaggtgtgggtgggagtgggggcgtgctggcagcagatcatgaaggactttcaacttctcatcgaggaatctggactttatttagacgatgaccgtaactgtctttagaaagaagactgtggggcctcagcgcgtgaaagtgctgaaagccgggagggtgggggagtgctaggggcctgtaaggaggctggccagggcagggtggtggccaggaaggaacctttcggaggagacttggcaatccatcgtaggggaggggcaaggggaaaggggatgaaccggtcgggcaacaggtggggagaaggcaggcctcagcgaggaggaacggttgtgaatgtgtgacttttgaaaggcagggagggagagtggggtgcaggctgcccaccacgtcggggtgtccagctgggattctcagcaagttccccgtcatggctggcgaggggtggttgtgcataaccagcccattgttttttggatcccgtggatctgtttgcttttagattatgtcatttgaggcttcctctctgttgttgcggagttacactctggatgattaaagatggggcagagttggaagagactgggaacagacagggctactggggaatgggagtgtctgaggatttaagaccattgggtgttcagggttttttttgccaatatatttatcagttgtgtttcaggagttaaatattttggggcataccaagatgaatcacacacggtctcaaaaaacttgtaaactgggcccttttgacacttttccaaaccaaagagacaggatgctagcattacctgttttaacaatactcatctccccttaagattcccgagttttgtgcactgtaagtgggcagcactccggagggactgagggttaattttatccttgtggataataaatgcatcttggacaaaggaagaacacatattttaactaagtagcagccttctgataagaattccagcaattgcacaagccccaccgttgtctgtacagcccagcaattctaccttgctatctcaatattctccgttttgcattcctctcttgcaggaaccagtttctagtctctcaccagcaggatacgtttccagggtgatctgcttactgaattggggctggagcccaggcgcagaggatccccgggaaagtggcttgagaactcccctgggtgggcgtgggagggtttcccagccctgcgttgggagctgccattgttttttccttagtcttgctttttgcctttgcccagcacctggttctgttagcatcgccaagatcagtcctaatgagctttgttgtttaaactggggaaggaaactttttccctcaacaaaaaggcgaattttagctcagcagcaggagggtggccagtggggagccaggggtcagaggcagttgagccctgctacataaatagcagcaattaatgggcccctgtaaaagacagggatgtgtgtgtttgctgtctagcatcgtttctctgcaaatcggagcaacactgaaattaattataaagccagcaaaggctattttctgctttctgttaaataagtattgtccacacaggagcacgttccactcggatgcatttacccacatcgtttctttggaagatggcgtgaaaccaatttattttcaaaactccccactgggtcatgctaatcaccacagttttcagcccttttatgcggaattcaggcttgggctggagccgggagccgggagccctcaggcccttgtcatttccttcattgctctgggggctttccctttgcccaccctgcccaaatcatttcctccagtgctgtcaaccaggtttgaatttttatgatgagatttacaaagcaagccattctgttattactaataaccatcataaaggtttcataaaggttctgctttggtttgctggggctagtacagtaaataacacagacctggggggccttcaacaacagacattgatgttgtctgagttctgcaggctggaaacctgagatcaaggggtcagtaggtttggtttctcctgaggcctcctctccttggctgactgaaggctgccctcccactgtgtcttcgcacagacatcctctgtattctcatccctggtgtctctctcttcgtatcaagacaccagtcctgttggattagggcatcaccctcatgtcctcatttaaccttatttccctgtttaaaggccctgtttccaaatacagccatctttctgtatctgcagggattggtttcaggatatccttttttttttttttttgagactgagtctcactccatcactcaggctggagtacaatggcgcgatctcggctcaccgcaacctctgcctcccaggttcaagtgattgttgtgcctcagcctcccaagtagctgggattacaggcatgcgccaccacgcctgactaatttttgtatttttaatagaaacggggttttgccatgttagccaggctggtctcgaactcccaacctcaggtgatctgcctgcctctgcctcccaaagtgctgggcaggatctccttctgataccagagtccaaggatgctcaagttcttgataacaaatagtgtcatatttgcatatatcctatacatatcctcctgtatattttaaatcatccccaccttacttagaatacctaatgcaatgcctacacatcacttcattcacgtggattcaacttagcacttggcatgcggcaaattcaagttttgcctattggaactttgtgaattattttccccaacatttctgatctgaggttggaacccatggaaggtcaactgtacaatcacattggggctggaattttgggggaggacacgacttagcccataacagattctgaaatagttaatagattcttcttcttccaactgcacgtggattcattcattcaagaaatactcattgagcgccgcctgtgtgcgggggctgttctggatgtggtaagcatgtcagtgagggaccatctcttcccttctggggcttctaagcgtcaggcagattccatgctcactcagttctgtgggacttcagaggtgataagtgctatggaacaaatagcctcggggcacaggggttgtgagctccagatgatgtggttataagtgggtgagtcagggaagcttctctgagagctgacatttcgtcaggatcttagaggttgagggagtgctatgtggccaagatccccaggagggaacacccctgtttctgctgctgaggaacaacgaggaggcgggtcaagccgagggagccgtgggctgcctgatgggagtggcgcaggcatcctcatgacgtggattctttcctttgggagccacggggagcctgggtgtgttttcatggtcctcacttttgggtagccttcctgtccctctagattcgctgctctggagaaggtgacagctcagacaagtttgggagagagatggggtgcctaccaaggggaccacccagaattagacattggcatgtcaggaattttaggggggcgtgtgggggctggtggtgaagaatgagggtccttctgtcatggatcgcctgctgtaatgctgcgcctgtgaggtctccccaccaccccttctccccatgtcctgtccccaattcttagtcacacttttaggaagtgagaaaccattttctgcagcaggaaaaggctggacggcaagcagggacgatagtcactgccttgggctcagcgcggatcctaaatttctgtttctgttgggactttcccagagctgctcggtctcctcgtacctactttctagcattggcatttggcgtcagttgtacggctgctgtctaccccaaattggaatctggaagaaacacctgggattggggttggccgtggccatgcatctgtccttcccccaccgttcctccctccccatcttctttccaggtccatgctggccctgttgttatccagggcatgctgatggagctccttccaggttcctgacgcggtgctggacactggacacgccaggttcagtcatttttgaaatgaccgagggtttggtgcctggaagggggttctgaaagtgttctaggaaaagaatgggcctggccttgaaaaagggtgagaaggagccaaaagggctgatcccagcaggggtctggagatgggagaatttcttgtggtgacgaaggaaaacctattgtagcctagtgagttacaggggaaaatagggttaggagattgtgaatgcctcggtcgggggaggagaggggtagagttgtaattaggctggttggggaagcctctctgagaaggggacatttctctttttttgttcgagatagggcctcactctgtctcccaggctggagtgcagtggtgtgatcacggctcactgcagcgtcaacctcccagggtcaagcccttttcccacgtcagcctctcaaggagctgggaacacaggcctgcaccaccacagctggctaagtttttgtatttgtttggtagagacggggtttcactgtgtggcccagactggtttggaactcctgggctcaagccatctgcctgggggacatttctcacacagaggtctgtcgactctgcatcacgatcgcacacaagctgaaacggtgtccacagatagcactcatatttgatttaaatgattttaatgtttgaagggaaggcactggtctgcctacattgtaattgggaaatctgagggctgaagtcgtgggatttcccaaggcagtagtagagatggccaagaacttatactggcctcctgtagtgccctggtgggattttccacacatgcattcatttattcattgattccctctttcccttgctcccatgagcccagcactgtcctagggtgctgggaggtcagacaccattcctactttcatggaaagtacagtggagggtatcatagcagctaagcgtgtgtgtgatgggtgtgacagctggagaggcccggagtgaccccagccagtctggatggggaagcaaactgtaacctgaggccagtggcgggtgggaattggggttgacctggccaagagtgtgtgggagggaattccaggctgggctgggtgggagtgggagacaggaggcagagagattagcagggaggcccaactctgcccgagggatgatggtggggctgcagcaggggagtacaggaaggaaggggaaggggagggaaattgtccaaggtggaggtgacagactcttggtgatgaatgaggtgtgggaataggggcagggtggctggaggaggatgttacagtagggccacctgtggatggttactgtaggctgagctgggagccccagagaggagttggggccgggggaggtgacaggctcggaggcccacagattatccaggtggagatggccagaggcacgtcagagctcaggaagaggtgtgagcaggacaggcattggcactcatgggcagatggacagtcatgagcgtgctggaagtggaggggtggacgcgtgcctccccagcagaggaaggcctgggatagaacctcagggaggctactgggggagaagcaggaggtgtgggacctgggagggcaagcagggtgtgagaggtcagcagggagagtagcctccgggtgccagggaccctggtgaggtagtcacagggagtagtgggagtggcagtccggggcaggggctgtctgggcttccgtgtctacccactcctctgaaccaaacacgcagagcctactgaccaccacttattgaggactctgatgaatgctctcagagccagggtttgcagcttcagaggctgtgtgcccagctgctgttgctgtgacgtccccagactggggaaggcaggaggagagtggaagaggaactgtaagacctggccctaggccgggcgcagtggctcatgcctgtaatcccagcactttgggaggccaaggcgggcggatcacctgtggtcaggagttcaagaccagcctgaccaacatggagaaaccccgtctctactaaaaatacaaaattagccgggcatggtggctcattcctgtaatctcagctactcgggaaggctgaggcaggagaatcgcttgaacccaggaggtggagattgcagtgagctgagatcttgccattgtactccagcctgggcaacaagagtgaaactctgtctcaaaaaaaaaaaaaaaaaaaaaaaaaaaaagacccggccctagcccgcagtgaatgaatgctagccctttgttcttacatttttactcttctgcagggaatcccgtagaattgtaggatgctcagatggtctattagcctgctcaggctgccacaacaaaataccatggagtgggtggcttaaaacaacagaaattcatgtttcacagtcctggagtctggaagtctgagatcaaggtgccagcggggttggtttctcccaaggctctccccttggcttctagatgactgccttctctctgtgtcctcacatgacctttctgtgcaggctcagagacagagagagttctggtgtctcttctccttcttataaggacatcggtcctactggattagagccccactctaatgacctcatttaacgttaataacctctttaaagtctctctctttaaatacagtcacgttgggggttagggcttcaacatacgcaattcagtctattgcagatggcaatcttgaaccatgacaaagaatctgaattatcctcccctccccgacaaatggtcctaaagatccaggactcttttatagtacaggttaattatctcttatctgcttgggaccagaagtgttttagatttgggatttttttttttttttttatatttgcttagtatccagtggagcacccttcattccaaatactccagtgaccattttctacaggtgtcgtgttgatgcttaacaagtttcagattttggaacatgttggattttgggttttcaggttagagattagagatgttcaacctgcatacacttatacctagaaccctggcaggtatattttaggtgtttaataaatgtttgttgaagaaggaaagattcatttgagtttagtatacagtattcattaagaaaccaaagtgttctgggaagaaagcttttttggggataatttccatatgaaaagaaaactcagttgatcagggcttcccattccctgtgcattttgattatttaaaacatggtgtaaaagtgctttgattaaggaaaggctatgaactttctaaaatacagcacattgtataatgtgtaaaacacatatgtatatttctgcgatattaaagaggagtctctttgatcagtatattttttttcttcctctcagttgtacagaagatccattttacatctgacttctcattttggagattggatacatcaatacttgatgtgtttcagagtaatgaattttaaaggcagtgaagggtgatacaggaggaagggatgaatttaaaatcctgttaactctgatcctatgtagacagtctcagctaagtcaatatttaaagaagatgagagactcgcctgataggaagtcactgccttgggatttaaaagctactctattccagagagttgaaaaccctgagatagagttcagccttcttttttaatatgctgaagccaccggtcaaggaaatgcatattgttttccttagctgaactgagcttgaatgcttattcaccctctctacgggttgattcattgaaagtaaattggtaatgataataacagcatcaatttaaggagcacttcgtatgtgccagacattgtactaagtgctttctttttttttttttttttttttttttgagacggagtctcgctctgtcgcccaggctggagtgcagcggcgcgatctcagctcactgcaagctccgcctcccgggttcatgccattctcctgcctcagcctcccgagtagctgggactacaggcacccaccaccatacccggctaattttttgtatttttagtagagacggggtttcaccatgttagccaggatggtctcgatctgctggcctcgttatccgcccgcctcggcctcccaaagtgctgggattacaggtgtgagccattgcgcccggccctaagtgctttctttatgtacattatcttagggactattggtagatggaagtgtgtgtcattaccgggtgcattactgggcctgggtgattttgagcatcccttattctaagtaaaattctacattggatttttttctcctaatacctaacaaaggccgtcaagcatggattcctcggcagtcagcaagtgacctctctcctgatgggttgggatccacacacatggcctcttcctcctgtcctgtgttggggagagcagtgcttccctttcgtgcagggcaaactcttcctcctcttcctctccttccttaaggtttcctctctctttctttttttttttttctgagatggagtcttgctctgtcacccaggctggagtgcaatggagctttcttggctcactgcaggctctgcctcccaggttcaagtgattctcctgcctcagcctcccaagtagctgggactacaggcatgcaccaccacgcccagataatttttgtatttttagtagagatggggtttcaccatgttgcccaggctggtctcaaactcctgacctcaagttatcaccagcctcagcctcccaaagtgctggggtgacaggtgtgagccaccacacccggccgggtttcctctctttctgtctctcctgcatcttgtatttcgttatctctgtagctgctgctagtgattttttggccttgggggatttccattgctttcttatgagcttagctatttatttaaaagtggtttgctgattttatccatcatcattgattggtggtgtttgtttggcagggaaggaggagggtggagttaccgtgttgtgagaaatgctttctgtttttcctttttctgagacagggtctcactctgtcgcccaggcttgagtgcagtggtgagatcataggtcactacagcctggaactcccagactcaagcgatcctctcacctcagcctcccgagcagctgggactactggcacgagccaccacgcctggttaatttttgtgagatgaggtttcgccatgttgcacaagctgctatttcttaattaataaaagaagttgatgaataatctctttcaactgtcatatattggaactgtgctcttctctttctactaattttccaccactgcaggactttgctactaatcttcttggaaatatgggggaaatctttggaaaactgattcctttgtaaaattttgaaaaggcttgcaacttggatctgttgatgagtctcggttttactgatctttgacagaaagttgtttttcttgtgctcatgatgacatccaggcttagataccctcctgaaactcccattcccaaacatacacacacacacacacacacacacacacacacacacacacacacacacacacacacacacacccctggactgaattgggagttccctggcggcattggctgggggcctcatccttaagtgaatcggggaacctgcagcgttggtaagagccattgattggtgtggtgctatcactcctgttgcctggaacatgctaaacttgcttattttactgccatttgatagcaaagatttaatttcactctgtaaaactcccccgactcaagtagtttattttgcagctagagatccattattgcattaggctttacccagttagagtcagtgttagctttgttttgcctgcaaacctctgattactgtcaaattgaattagatgtctccctttgctgatcactgattgacttttccttaatttcccattcattttttttccccatttcagttgttatagatgaagtcgattaaatggttttgtgtaatcaagaacggcattccatttcagtattatcaacttgtaagtatggagcttgtaagtcagggggtggatgaaaacaagctgataatgagctggtatttgaaaattgagagggagcttaataggaaaccttctccaaggtgaggtagcttaagggctcagggttttcatggagggaaccttgatggcagaacttgggaatcaaggtgtcagatgatggtagggcacacaccaggggtgttagtttcctgcagctgctgtaacaaatgaccacaaacttggtggcttaaaacaacagaaagtgattccctcacagtctggaggctggaagtccaaaatcagtctcattggagatcaaggtgtcagtagggccacgcttcctccagagacctaaggggagacttggactttgcttcttctcccagcccctggtggctgccatgggcatctcctgggcttgtggccatgttattctcttgtctccgtcttcactttgctttcttctctgcttgtccatctgatcccctccgtcttttaaagacatttttgatggcatttaggactcacccagttaatccaggacagcctccccatctgaagaccattaacttcatcatgtctgcagagtcccatccccctaaagatgacattttcaggttccagggattaggatgtgggcctatctttgggaggccatttttcgacttaccacactgggcctgcttcacggaaggccttggtacgacggcccaaggcctgggctggactgagtggtatgaggttgaggggctggactgagcggtatgaggaggaggggctggactgagcggtatgaggaggaggggctggactgagcggtatgaggaggaggggctggactgagcggtatgaggatgaggggctggactgagcggtatgaggaggaggggctggactgagcggtatgaggatgaggggctggactgagcggtatgaggaggaggggctggactgagcggtatgaggttgaggggctggactgagcggtatgaggaggaggggctggaatgagtggtatgaggatgaggggctggatggggtttccagggggtatttccccagcaccatagatcacctcattgccttgtcctttcaccttcaggaaagggaggaggatgggctagagaaagagcaagaagtgagagagtggggagaaatgcttggaaatactgcatttgcacagaagttggaaggtacaggaagaactgcctaaagaaaagcctagcatgcacccttaagcctggcatgtgggaaccaacaccaattgttaggatgactgtaatcgtacggctgtgataatgaggtctagattcatggaaagagccacctgggctgtcctttctgttcagagtggtctgcagtgtagacacttgctaaccaattgtggagcttcatagggtcctattttgacatagctcatggaggtgcaaaaccctgatatgggctggttcagccctgggagtggagcctgagagggagttcgtgaagactctgctctccgtgggtctcatggacgtgcgggagcagaggggacggtggagtcaatgaggaattgtcagaggctcctgagactacgctgaagggctagagtgaggaggagagagaggctgccggtgaaaggtggcgtcattccccactgccaaggagggtctctccatgcctggaaatgcgtcccaaagggcatcagatagattccttatattttcagggaagctatttgttccttgtggctgctataacaaattaccactctggtggcttaaagtaacaaattgattctctcacagttctggaggccagaagtcttaaaaagtattggcagggccacgctccctccagagactctaggggaggatccttccctgcctcttctggcttccagtggcagccaacattccttggcttgtcgcccctcaccccaatgtctgcctccttcctcctgtggctgccccctctgcttatttgtgtgaaaactccttctttctctattttataaggacacttatgaggacatttagggcctacccaggtaatctaggctaatctcatctcagaattcttcacttaataacttctgcaaagaccctttttccaaataaagtcacatgatccagagattaggccattattcaacctggtacaggcaattgaagaactcaataaggtatcttaactataattgtgtactctgttaaaaaggcagattgtattactgctgggcctttagacttgtttgtttacagtacttgtaagaatttcattgccagagggtgtaattttttagatactgccacacggagtggagcaaagacaatgcctaattgtacttttcagcattcttttttctccacctccccaagaggatggatatgaaatatgtgtgtgtctatgtgtttttggagggtaacagttaacaaagctgttagtttagcatcccttgaactacttggggccagacacagccagagtgtaactttacctcctgggggctgagagcatcagcccgagctgacttgaggtagtgcaggccccatgctgtgaggtgtggatggcaggggctcttctagcctgtctggtccccttgggggctgattgactctttgttactcccatctttggattaagggcctgaacctccctattaaaatgagactctgggctgggcacggtggctcattcctataatccccgcacttggggaggccaaggtgggcggatcacttgaggccaggagtttgagactagcctggccaacatggccaaaccctgtctctactaaaaatacaaaaattagctggatgtggtggcgggtgcctgtaatcccagctactcaggaggctgaggcaggagaattgcttgaacccgggaggcagaggttgcagggagccgccaagattgtgccactgcattccagcctgggccacagagcgagattccatctcaaaaaaaaaaaaaaaaaaaaaaaaaaaagaaggagacactgctctatagaggagataatacattatgctgtttatagccatctttgctttggtgattccattggttagtcactattagtcacttgctgtttatgaagcgctgtgtgtcgtgaagggggagtggtccctgcattaagccatgacttacatcttactgcagatgctgttgtatagggacgtagggaaggaaggtgcgggggagtctctctggtagggaggttagcctctgaaggacctggggttgggggcttgagtgggggaagggggtggctggagtacctggagagtgatagaatgcatgtcccagggagtgacaagacatgccaggagggagagctgggaggagttgggaccgggtggtggtggggctgatggagaagatgcttgggtgctcccataggcagcagtgagacctcaagagcttctgcaagaaatcagagttctagacccactgatttggaggcagagtgtagaatgaattcaagaggccaggaggagcctcaagaagaggtgacatccatgccttagttcaccctgggggtggccagacttttattgattcgttcactattttgtttaatttaaagtttgcctttagtttggactttttcccttttttgttttctttttgttttttaaggttttcttcagctttattgaggtttaactgacagataaccgcgtgtgcttatagtatgcaggttatgataagtgagcatgttgtgaaatggttaccatggtcaagctcatggacatgtccattacctgacagggttatcagttttgtgtgtgtcttgagaacattaaaaaatctctcagcaattttctttctttttttttgagatggagttttgttcttgttgcccaggctggagtgcaatggcacaatctctgctcactgcaacctctacctcccaggttcaagcgattctcctgcctcagcctcctgagtagctgggattccaggcgtccaccaccacacccagctaatttttatatttttagtagagacagggtttcgccatgttggccagactggtctcgaacccctgacctcaagtgatccacccgccttggcctcccaaagtgctgggattacaggcacaagccaccgtgcccagcctcttagcagttttctttctttttttttgagacggagttttgttcttgttgcccagtctggagtgcaatggcacaatcttggctcactgcaacttctacctcctgggttcaagcgattctcctgcctaagcctcccgagtagctgggattccaggcatccaccaccacgcccatctaatttttgtgtttttagtagagacagggtttcaccatgttggccgggctggtcttgaactcctgacctcaagtaattcaccctcctcggcctcccaaagtgttgggattacaggcacgagccaccacgcccggcctcttagcagttttcaagtgtgcaatacattattgttaagcctggtcaccatgctgtacattggatctcagacttctgtttttttctttatcatgaactatgtccacaaaataatatttgagcccctcactgaaaacatgtattcatctgtatttatttacttattatttatttctgtacttgtacctctgtgtatggcatattgcatataatgcatattgagtgcgttgtgaaacaggtacaaaatgtaattacaaaaaagagaaataacaagaaatggaaggtccactgacttcatcctgcacccggaggctccatagctgtgtatgaaggtgttcctgggatgctcatgtctcagttcatgacagggcatctgggcactggggcagtggttggaatgaaccaggcgggtggtgtaggggaacagagaggaaggacaggtggcgagacagctggaagaagacattgacatcatgtgttgacgtcagtggctgatcacattagagaggggagtgaagaaaaaagaaggaacagggcagccggcgtggtgactcacgcctttgacgccggtgctttgggaggctgacaaggagaatcactggaagccaggagttcaagaccagcctgggccacatggggagatcggtctctacaaaaagaaaaaaattagccagccgtggtggtgtgtgcttatagtcccagctcctgggaggctgaggtgggaggatcacttaagcccaggagtttgaggcttcagtgagccatgattgcaccatgtactccagcctgggcaacagagagactctgtcaagaaggaaagaaagagaaaaagagagagatagaagaagaaagaaaggaaggaaggaaagaggaaggggagggagagagggaaggagggaggaagggagggaggaaggaaggaaggaaagaaggaaggaaggaaggaagcgagggagggagggagggagggagggaagggaaggaaaagggtgaatacaatggagaggtgacttcccctaaaggaaagaggactggggacagatgcggatttgggtggaatagacaatcttcccttccctctgttcctccatccttccttctgttcttccctccctcccaccgtacctcttatgacaagttgattgtaggggcaatggcccaggaggagcttcctgagggtagtagaaatgtgatcctgagtaacaacaaaggttgggtcctgacagtgggggccaagtttccctaggaggcaattcatcaagggaaggaggtagaccctgaggcttgagggtgtgcacagggcagggcggagcgggggcgggcaaggctaggggtgctgcatctttgggcagtgtcccccaaccatgccttggaactaagattgggggaagatttagctgtttctgaagtggctgggggtcctcagacctggagggagatgatggtgagtcctgagggggactgggacaagccctttgctggaagagaaattgttatttcatcttcccatcctgtagaaaaataaatttgacattaatcctgcactgtgccttccagacagccattcaggttttcttaggtaaattccattgtcttccttaataattggaccttttgatttttcctaatgttgtacctatatgtgtgtgtgtgtgtgtgtttgtgtggtatatgcataaatataaatgtgtatatatatattttctgttgatgctgttttaggtaaggtgtttctcctctgcagagacatagctagcatttttcttgggttcctgtgagtagccaaggcatcgctattgtctgtaatgtctgataacaggcatgttcttgttttctccttaggtggccataaaagtcattgataagaagagagccaaaaaggacacctatgtcaccaaaaacctgcggcgagagggtcagatccagcagatgatccgccaccccaatatcactcagctccttgatattttagaaacggaaaacagctactacctggtcatggagctgtgccctgggggcaacctgatgcacaagatctatgagaagaagcggctggaggagtccgaagcccgcagatacatccgacagctcatctctgccgtagagcacctgcaccgggccggggtggtccacaggtaagggccaggccacgctggtgatcgctgactgtgtgctccgtgggtggcactgggctgtggcaccctctgagcctctgagaaaggctgagcaattgcagcctgttttacaatttgtctatattttaattttatttatttgtttatttttttgagacggagttttgttcttgttgcccaggctggagtgcaatggcgcagtcatggctcactgcaacctccgccttgtgggttcaagcgattttcctgcctcagccacccaagtagctgggattacaggcacctgccacaatgcctggctaactttgttgtatttttagtagagacggggtttcaccatgttggccaggctgggaatttttctgtatttttattccatggaattgttttgtgaattgggttaatgccagtgtgagggttaaaagagtagaatctgaagccagagtgactgggcttgcaacctggctctgccctgtaacagttatgtgaccctgggcaagttacttaacctctctgagccttggtctcttaatctgtaaaatgggaataataataacacttctctctcagttggagtaaaggtcaatgagttaatatatgggaagagcttgggacagtgtttgttacctagtaggtatcaggtaagtgttagctgcttttcttcttgtttgcatagtcatgagaccagttgtttaggtgcctgaaagagccagtgttaaaatggcatgagattcgtgctagggatgatggtgctttcattgtctttgctttacacatagtagacactcaatagcagttttattcaatgaaattgaatcaccattcgaattttgaacttgcccttgaaatcaaggagtgttttccacaaaccaaaccagtcttgcaaatagttaggaaaatcaagcttgtttttaatatcctgttgtttcctaggaaggggctctacaaagaaagtgaatggaaacagcgttcttggcaatgttgccattggtagtgggtgcctgcttttagtactgtatgaaaataaaatcaaacaaatttaaagaaataaaagctccctcttttcctccaagggagtgttggcttcaccaataaatgcatggttcttcctttgtggaattatgatcaataattactctgggttattgagaacaaccagaaatatttttttttttttttgagactgagtctcgctttgtcgcccaggctggagtgcaatggcgcaatcttggctcactgcaaccacttcccaggttcaagcaattctcctgtgtcacccaccctagtagctgggattacaggcatgtgccacaacgcccggctaattttttatttttagtagagatgggctttctccatgttggtcaggctggtcttgaactcctgacctcaggtgatccgccctcctcggcctcccgaagtgctgggattacaggcgtgagccaccacgcccggcatagaaatcatttttaattggtgcttattttaaaaagcaagattgaggcatgacatatttatgtgtgtgtatatatataaacatgcacacacgtgtgcacatgtatgtttaaatatttttaaattaataaatttatatactataaaagtcaccatttaaaagtgtataatctagtgttttttagtgtattcacagagttgtgcaaccatcaccaccttctaattttagaatatttttattaccccccgcaaaagaaaccctgtacccattaccagtcactccccatttccctcttcccccagccctggcaactactaatttactttccgtgtctatggatttgcctattctggccatttcatataaatggaattatataatacccggtcttttgtgattgctttctgtcatgtagcattatgtttttcaggtttgtctaagttatagcatgtgtcagtgtctccttcctttttatgactgcataatactccatgtatggatataccacaattggctgatccatttgagttgttcccacactttggctagtaatactgctatgagcgctgttttcacttctcagaaaactccactcttaggagtggaattgctgggtcatatgtcagctttctttatccttttgaggaaatatatattttaaaaaaattcaacatttaatgataaatctaattttaattttaataatgataatctagctctatttgaaggccattattctttctttctttcctttttctttctttcttcctttctttctttctctctctctctttcttttttctttcttatttctttatttcttttttgttttttgtttttttgagatggagtctcactctgtcgcccagactggagtgcagtggcacaatctcggctcactgcaacttccgccttccgggttcaagagattctactgcctcagcttcccaagttgctgggattacaggcacgtgccatcatgcctaactattttttgtatttttagtagagatggggtttcaccatgttgcccaggctggtctcaaactcctgacctcaaatgatccaccctcctcagccacacccaaagtgctgggattacaggtgtgagccgccgtgcccagccatgaaagccatttattttcaggccgggcgcagtgctcacgcctgcaattccagcactttgggaggctgaggcaggcagatcacgaggtcaggagatcaagaccatcctggctaacacagtgaaaccccgtctctactaaaaatacaaaaaaattagctgggcatggtggcaggtgcctgtagtgccagctactctggaggctgaggcaggagaatggcatgaaccaagaaggcagagcttgcagtgagccgagatcacgccactgcactccagcctggacaacagagcgagacttgtctggaaaaaaaaaaaaagccatttattttctgatcagtgatgaaagcagctccaggcctttacttaatagaacttagacttccaaggtggagagagctgcctccttactaacgggattggtgccgtgggatgctctgccctctcatgtctaaacccaggggaggaccattgtccaggccttttctagagccagccttgggtaggcaccattcaggccaatcatttccgcctcaccaaggtgagagcacctcttcacatacgtattcttagtcatgcatgttgtcatgagatcacccttcattagaactctttgggcttagattagcaaggaagagaacattcagaaatggtaagtgaatcacgctatttttggctcttcccaacaatacccttgggtagcctgaggtgtcataacgctgctgttattaggaaaatgatagtcgtaagtgtgcctggctctgtctttgtttattaagatgacaaaggcagaaacctcacaagtgaatcagcttggatcaccgactccgcaggtcacagtggaaaatagaaccagggactgggagcggcagatctttctgtagtactcagggtgttttttccaagggttttgtgctgtcaaaaagaggatgagcaccgagcttctcaggatcgcgagaacaacaaagaaaaccaagtggaagctgtgccttgtgcactggcctctcctgcaggaaattctcaacagcccttttaaagtaattttaacaaaatccaatccctctcagcgcaattactgtcagaatgtcaaagcaatgaatttaataatgttttgatagcaaagacggtatactttttctttctctgatctccagctttttctacttttgcctctctctcctcaggaatatatttataatccaataatggcaagggctcagatcttttaaagttagagaagactggagatacagggacgatttaggaagatttttttcacttttccctctaaaaatcatgttaatgtgtgtcaccgcacacggacataggtgattaggtggttgagacctcacattaaaatgcttgtttagaatatattcatagtggctttaacggaatgtcttgactttcaaagactctataccactaattttgggtgttcgtatttcagctgaccactggtatgttctttgctggagcgctttctcataaagaattttctcctttatgctgcaaaggtggaatgaatttcataaattattttgaggttagatttttcaaatgaataagagagtattgcatttcagagaggccctggagtccctggtgggaagatttctaagtaaatacattggatgatgcaaaaggatgcaggatgattttttgtggctatatgtgtacagtgatttaaggggcttttggttgtgtgtgtgtgtgtgtttgtgtgtgtgttaggggatgctttaaaaatgcagttcctgattaggctgatattatgttattatgtcataatcaacttaatgctagcagagccctcatttcctgtggcattaaatggaaatatttatttatctttccagaactatttaaacatcatttaaaagaaacaataaatatgacaagtaggttttgttttttttttttaatacaaaggaaacttagcatgtataaagcagattcactttgctggcagagagcttcctattagattggacttgccacagcctctgtgtctagggctgttgttcatttttacaaaggtagagtgtgttctaacttctttattattctattttagaattgtctaagcttctctaaaatataacgagttgtttttccttcccctaaacgtgcttactgagcaggatgccaaaatctgatgatttgcctattgtatatagagcatcaactcttaacgtgaatcaccaagaacgccgattctgctgagaggctaatttgagattcatgtgttcattcaaaataacaaagtccaatcaaactatacagataaaacacaactgggtaatacaataccaccatccctaagcaggaagagaaaagccacggggctgcaggaccaggagaaagagacacatgatcaaagggagcccgagcctgagctcggatgtgtgtcaacaccgtggctcccagggccatgaccttatccattcatcaatatggagaaaagggctctctgcgcttaagaggaaggcagtggaagagaggaggcccttctttgttcttttgggcctgacaagaagcaggcacaacctgtgctggttagggggttaagaagttctgttaactttcaggttttcttggatttctgctcacatccaggagctgggtggaatcccagggccttctgctgagagcaagcacatatctggaggcatcagttacagcaaaagttttgtgtttaattgggtttaaaaaaatagcattggaaatgtgagctcttgcaaagctccagcccaacagcttcatggattgggatgtacagtggtccgcagtgctgatgcgaaagcctgacccccttgtccatatgctggtttgaccactcgaaagtggcgctgggcaaatcgctcaggcttttgtgcctctctttccacagctacacaacagggaaagcggattatccacttcacatggctgttgtgaggattaaataagtcaatctgcataaagcactaaaaactgagactctgtgtaaggactgagtccatgttctctgtaattactactcagtccagcccattcattttatccacgggaagctgagacccacagttctccgtgctgagggtcccacagctgttctctgcttgcactgcccttgttggctttggctgaattctactcatccttcaggtcccagctccaggctcaccttctctgggaagccctccaggcttggccccctggccatagactctcagcaccctctacttttctttctgagcacgtatcccatggttacttttctctatctgccttctgcacaggccatagcttagcccagtgctcagcccagtgggcacacagtaagactttgttgaatgaaggaaggaaaattgaatgaatacagctagtgtcagagtttgcactgggatggaagctttctggtagccagtcctatgttctggaatagtccatattctccctggaatttcaaaggagtttcttcattgacttagtgtcaatgtgtttattttttaggtcacaatttgtagagtggcatctttctagtgaatgggtctttcagttttataaacagaatttgtttctggaacattacgggaactcaataaaggtttcattttgaataaataaatcaggttcatggatgacacattattcttgtattttaccaaaatacccatattgtaaataaatcaagaatttgcacatcatttgcttttaatacagtgcttttgaagataagacctaaccaaaaaaaaaaaaaaaaaaaaaaatcatgttccctgcaaaatgcctgttgccttggggagttatgtgcttggggagtttgggatgctttattcttagtttattattaaaatccatcttgtgaccatccctgtaggcaaaactttttccatccaacttaatcctgtctgagttgggtctatccttccctgggccccttctctcttacctttcattgggctggggggcatgccccccaatactctttgcttatggccaaattaatcacctcttttaagtattttctggagtctttcctcttcaccttgtcttagaatctttcactttattatcctcacctccagcctctcacctcgtaaatggagtggcccgcaaagccctcgggaatccactgtggcatctccctctgccagtggccctgctgggtaacccttctcatgatggtcgggttccaggggagaatcagaagctccgagagtttaaatgacttgcccgggccgggttggcgggtccattagagagagccagaccccagcacctgtccttactcccttccccaggcccccttgcttggctgcctgtctttgctcagcctcctcactcggggtgttcactggttctgccacgtctcacgctctcctccccttccctcctctcctgatgcctcggtgttacaccattcagttctttggactcaaccctgagcggctcccccaggctctttcctgagttcctgcccctcagcctagacctcctgggctgggcatggtctgtggaggcccaggggagagactgccttctcccatctgccttctcccatcccacaaccctggatgcatgtgatgcatgcacgcgcgcacacacacacacgcgcgcccaccgccatatacacagggtgcacgctgacacagagctcacacgtgtgtatgcaacacgtatgtgcaaacatgtgtacattcatacacccatggatgcgtgcacatgcatgcacacacccacacacgtacactcatgctctcccccacgtgcatgcacatacgtgcacatagtcacatgaacatgtgctcacacttgcaatgtgcccacacaaactcatgtgtacttacacactcgggcgtaaacacacacacacactcctgatttccacttccccagcactgctcctgtctgcctctttgctccacagggttggagcagctgcctttctgcccccaggggtgggggatcacctgtatgtttgtcatggcaacaggaccctccctgactctcctccctcgcaccctctgtcctgaagggcagtgactcagtttatggcggccagtctcagaactttccaactgaccatcttgaaagagatgcaaggagagtctgggtgggtggctggaggggaggggaaggggttgcttggtaggctgtgggggaaccttgaatggttagtcatggcctgtttgcatgcttgtgcttttgaaagaacttcaaacaaagggctgtgattaggtgatacctagagggtgtggaggagtcttctccccttaggtcctttccggatctctgtaaaaacaccctgcacttatctcaacatctggtctgtctgctgtgatgggtcccctttgagcatttcttcctggaactgcctaatgagcagagaagggtcctgaagccttctgaacccacaccactgtctctctagtggcctcttctctgctgagctccctgctcctgcttcaccgtggcttctggttggtatatcggtgttgcctgttgttcctaagacatcccctgcacccctgcatcctcacccccagcactgtcctcaccaacccatcctcctgcgctgccttcttcctttttttttttttttttttgatacagagtcttgctcaatcccccaggctggagtgcagtggtgcaatctcggctctctgcacctccacctgccaggttcaagcgatgctcatgcctcagtctctccagcctgtagctgagactacaggcgcccatcaccacacctggctaatttttttatttttagtagagacagggtttcaccatgttgaccaggctggccttgaactcctgacctcaggtgatccacctgcctcagcttcccaaagtggttggattacaggtgtgggccaccatgcctggccctgcactaccttctgtgccttgagccacacccctttgttgcttctcctagctcctctttgaaggcccattggccaagaaaaagcaacttcccatctatcccagggccattctcttctccttcacatttgttctcagttaaaagttaacactgggccaggtacagtggttcacgcttataatcccagcactttgggaagccaaggtgggaggatcacctgaggtcaggagttcaagaccagcctggccaacatggtgaaaccccatctttactaaaaatacacaaattggccgggcgcagtggctcacgcctgtaatcctagcactttgggaggccgaggtaggtggatcacctgaggttgggagttcgacaccagcctgaccaacatggagaaaccccgtctctactaaaaacacaaaaattagctgggtgtgatggtgcatgcctgtaatcccagctactcgggaggctgaggcaggagaatcgcttgaacccaggaggcagaggctgcagtgagctgagattgtgccactgcactccagcctggggaacagagcaagactctgtctcaaaaaaaaaaaaaaaaggttaacactgaatttccagtttatatgccacagggggagctcttcagacggcaggactgaaggaagatcctcccacttccctctcccctccatgaaagaagttaatcagatcaaggaccattcacgtgaagtgggcattctacttccctcaccgcatcgtcatgtgccgaccagcctgcccttcaccttccttcccttaaagcacgtctcacacttagcagagccaaatgttttgctcttgggatggagctagagtaaacatcaggcttttcacatggaccacaaggaggttttctgatagagccagtattctggataatataggcttgctcataatttttttaaaggtccattataatacacgaatactgaggctgggcgcggtggctcactcctgtaatcccagcattttgggaggctgaggcgggcggatcacgaggtcaggagatcgagaccacggtgaaatcctgtctctactaaaaatacaaaaaattagccgggtgcggtggcgggcgcctgtagtcccagctactcaggaggctgaggcaggagaatggcatgaacccgggaagcggaacttgcagtgagctgagatcacgccactgcactctagcctgggcaacagagtgagactctgcctcaaaaaaaaaaaaaaaaaaaaatacacgaacactgaaaccttatgaagaaattcaccccttttaaaactttcaacttttatttttgcttcagggtgtacctgtgcaggtttgttacatgggtatattgcgtgatgctgaggtttggggtacagattccatcacccaggtactgtgcatagtacccaacgggtagtttttcaaccctcgtcctcctctttcccacccttctctggtagttctcagtatctgttgttcctgtctttgtgtccatatgtacccaatgttcagctcccacttacaaggaagaacatgcaatatttgattttttttttctttgttaatttgctcaggataatgacttcgagcggcatccatgttgctgcagagggcatgatttcattcttttttatggctgcatggtattccatggtacatatgtaccccgttttctttacccagtccacctttgataggcacctagtttggttacgtgtctttgcggttgtgaatagcgctgtagtgtcttttgggtagaatgattgattttcacccttttttattccagttgtctctcaatttttctgcctctttggatcatttgtgtcctctttgatcactgttgagtagctgagcagagggtctgggttgctcactgttctgaatggactcagggacataacttcagggggctaaggatgtcccacagtgaactgcctgagtgaggcacttggttgtagttgtaccattcttagtgtggattgcttaggaaagggaaatgtatccaaaagctgcttttacaaaaatctatagacaatgttttttagagcagtttcagatttacagaagacttgcatagaaactatgagagttcccgcataccttccccctactcacattttccctgttacgaatatcttgtgttcccctggcacatttgttacaatggatgaaccagcatggatacagtcgtattaactaaggtctgagtttaccttagggttcactctgtgatgtccagttctgtggattttgataaatgcacagtatcatgtaacaccactacagtaccataaagaataattttaacaccctaaaacccctctatactccacctattcatctgtccttttttccctctcacaccccaacccctggcagccactgctctttttaccatcgccatagattcccagagtgtcatacagttggagtcaaacagtatgtagccatttctgactagcttctttcaattaaaagcatgcatttgacgttcctccatgtctttccaagtgaatcacaccatttttggctcatcttatttgtttttatcactgaagataaaaagatattctgtaatatcttatctcttttttctttttcttttttattttttgagatggagtctcactctgtcgccctaggctggagcgcagtggcacaattttggctcactgcaacctccgcctcccgggttcaggcgagtagctgggattacaggtgtgtgccaccacgcctggctaatttttgtatttttagtagagacggggtttcaccattttggcctggctggtcttgaactcctgacttcaggtgatcaacccgcctcagcttcccaaagtgctgggattatgggtgtgagccaccgcgcccaaccttatttctttttatcactgaatatgccattgtttgggtgtgccaacgtttgtttatccattctgctgctgaaggacatcttgggtgcttccagtttggggaaagaatgattgaaactgctataaacatttatgtccataagttttccactcatttaggtaaatacctaggtaaaagctattttaaaaaatgagattttagtgccttttgtcctaaagtctggaagaaagtgttctctctcttcctattggataagttacaaaggacagagcaggaagtggaagtaaataaagccaaaggctattgaatgttcttttcttttgcgtgggtaagtacactgatcttttggacagagacagaagtagctcaccctcccattaactagccatggaacctttaagcagttggattggttgtcactgaaaccttttagaaatctggacaaataacccaggttaaccaggtttattctgtgcatttttcttaggggatgggagttggttataatgggatgctatgggtgggaagatagtgactttgaactgattttatttttttctcagtttgcctaataattatttttaatatgtcctgccctagttttaggacatttcctagatttgaaaagcggatatttttttttcttttgcattttctcttatttttggtctttcgtttatatcattcttctaatcactgtggttgttctctaggcttttgtggccccagaattacccaacttagttttattgttcttggcagttgctgtcttttaccttgcctctttaggatgtttttccccacagtatttgctctgaaccaaatttctcctttaatgccttagaggggcttccattcttcccaggcaaagagggcttaacttcgtttgaaacaaactgtggccttcctttagatttagagagtactgctgtttataatcagggttcacggaatcacagtttgggatattgctggcatactattttgtgtatgcatgtgtgtgtttcggaattactgtttatgcctgaatagaagtcaggctgatattacatcttcagtatcttcagaaaagaagaagtgccttacagagtccttgcaagtctctcatatgataaggacacaatttcaatcatagtattttattttcaataacaaagtactagttagagaagacacataaacctttatttggctcactgatgactttgggtgctctagaaatcactcgaggaacccagtaggaaggaaggtaaaagcatttatggggctttaataataacttctagagatacggcctcttgattgtgagagtttgagagaccagtctcaaaacagttcactgagtggttaatttatggagattttaaatgggtgtgtatgatttgggataagatttccagcaagtgcctcatatgcaaattttaaaaatactttatctcaaatatccagtcacctgaaagatcatgttacattgaaccactgcacaaggactcaaaaagtcatcctggttctgcctgtgactagtttgaataaaattgtttcatgaaatgtgacagtgtggaaacagtatttcttaaattaactatgttaaccttttaatgtatggtcttaaataggaggatgcagcttcaaagataagtagtatcaacagtcatttaataattctattgcattcctaaaaattatacatttgtgttttccaaaaaccttttactgagggacaaagtcttcctgttggaaaagcgaggatatcactgtatatttggagtcaccctatatttggacacgtgatatctttaaaaggcagacacagttttgaagtattctgtgtattgtttcatttggagtgaagggaaagtatgtaattcttcttcccattggtgggcacattggattggggaatgtctgtttatatccccagtttgaacatggatcttccttctcagccagtgcccagccttaaggctattggcaactctgaatctgttggacaccttttagagttcacctttttttctgcatttgactccttaattcttaccatcttgtagtcctgcccttcctgtgacaacagcctggctgacataacccctgcccaccccgcaactgttctttcccagtttgctgtgaatgccagtgttccccaccagcctgttgggtctttcccccgcaccacttctctgccctcaccttcacaatctcacgtcctttcaaggcttcagcatctgcccatattgaggttgaaaactggtagcctgcaaggttggggttatggttgttttaaatatgagtttgttgccaacatttaaaaattgagatcaaatccagacctctggcttcttctgtagaatgaggtgagctggcagtgttgggaccgagccgtgagtagctgtccccgttaagtggggcactgctgtcctgtttgccacagccagtcctagctatcgctcctttttgtttcagacattgacgtagtgtatcagttgccgtttttgttttaacatgattacgccattcagttccctacaatagagataagaggaaaaagaaacatttctcttgcttatctctctattcaaaagtgagaaaataaaagctggaccaagaatggtatgtttaaaaacggtggaagagaacgtgtgtttgtatgtgtgtgtttgtgtgtgtctgtgtgtgtgcgtgtgtgtaagagtgtttttacatagttaacattcaaggtatgcctgcattggcaggctacaatttaagatgccagagctgataataattgacctagatggttttgatgtccaagtacatcctttgcccacataaatacttctgcttctgaaatctcaaatgatctcatcggtaatctggattcattggtatttactgagtacctggaatgtgcaaaagtactggggtgcaatgggaagcagggtagacatgtttcctgccttctaggagcttacagtcgcaggcgcagacaccagagacacctcacactcaacatgaccctgggctcatttctcccttccacctcctcccgtcacctcagtgtcaatgcatggcatcacccattatctgattagcaatcttcattccatctggaacttaattcccttgagctctgtaaagttaacatgttctcgggtgtgacagcaggaattaggacaccaacatctttggagtccattattttgcccatgataatatctgcctgctaaatagattaacttatcatcacctgccagtttgttatgacccttgggctccaaacatggaggtcactggactcatcaattaagttggctttcatgtgttttttttttttttttttttttttttgagatggagtttcgatctcattgcccaggctggagtgcaatggtgcaatcttggctcaccacaacctctgcctcccgggtacaagcgattctcctgcctcagcctcccgagttgctggaattacaggcatgcgccgccatgcccagctgattttgtatttttagtagacacagggtttctccatgttagtcaggctggtctcgaactcgcgacctcaggtgatctgcccaccctggcctcccaaagtgctgggattataggcgtgagccaccgtgcccggcctcatgtgttgtttttttttttttttttttaaattgcttccccaaatctgatgttgctcatagtgtcaccaacccagggccacattcatatgaaatatttgcctggccgctcaggctgtgccatcttgagtgatgtgttcctctctccccacaccctggttctgcttaacttccaggttccagtttaggtcttgctttttccagaaacttttcatgatcccttctgtcctctttgctgtctgtcatgtctgaaattcttcagcttttatagtctacagcaattaattattaatatatcatgtcttttaaatatttacttgttgattgagttttggcagaaagctttatgggttggttagaagtggctctaaaaacagttcatttcccttcagaagcaaaatgtaattccattatttcgaatgcttatctgaaatgctgtgtggttttgtttatttcagagacttgaagatagagaatttgctactagatgaagacaataatatcaagctgattggtatgacttttttttttttttaagcaaaagtatcttttaagtgttgtgttgtcagttctcaactttgaaaattatccatggtctatctctaatacccagacaatattctagattatcttcttttacctccaatatttaataatggttttgaaaatgggtcatgtgtttccttgtcttattcaaactatagcttctccataaattcagatggagctgaccttttgtagaatttatttttatttggattaactggaaaacttctttaaaatagtgaaagatagtttggcttagaaatgcttcccatagcttcgccatatctcattccacttcttggtgaatgcagggatgcctaaagtaagggagaatgcaattgaccttctctttttaatacaatctttattcaggcttgttggtacaatgggagctgtgcagagaagtccccacaaagggataattagaagtctgaaccaatcagaaggaagctacaagatggggcatcataattggttcataattcatggtccatagcaaattcactgcacaactcgttttctagacgaattcaggtggttctgttgttgttattttctccctctgtggtcgctctgggcagaattcagggcatcatttttatatccagatattagatggcaccatcttttattcccctcttttcttttttctcccacctcagatgcaagtaatttcttttacctcaatggcttgaaaagactttatatgaggggaaaagagaaggatcaataggactttgtgaatttaacttttatgcccaagaaggaacttttgtttgacaaatgctgaaagtcatcacaagattctccaaaacacatcattaaaatgacttattagatattttgggattacagtcagctcccaattcagtactgggcaagaggatgcacagactctggataattaaacaccactgataggtgttgatggatacacttattactagagagttaatcgtgaagaggaaaccaatttttccccaaaagcatttagaagaatctattcttagaagattcttagataattcaaaggattttcttttcttttctctctctcttttttttttttcctgagatggagtctccctctgttgcccaggctggagtgcagtggtgcaatcttggctcactgcagcctctgcctcccgggttcaagcgattctcctgtctcagcctcccgagtagctgggattacaggcacccagcaccacgcctggctaatttttgtatttttagtagagatggggtttcaccatgttggccaggctggtctcgaactcctgatttcaggtgatctgcccgccttggtctcccaaagtgctgggattacaggcatgagccaccatgcctggctgattttctttttgttaaattgttttactattgcattttagttgtcttgaggggccaagtgcagaagctggaaaacaaggcactcgtgttgaaatgcttgcaggaagtctctctggtcctcatttccgagatctggagtgttaaacaaaggggcctcctggtgtggggtagggaatggaggaaaggagttttttgttttaggttccctgtaactgttctttggaaaatgtggaggtgacagtgatagagttgtcctaacagcaccagagactataaaagaacagactttgtaacagcagtatttatatgacaataaaagttagaataggccaggtgcagtggctcacacctgtaatcccactttgggaggccgaggagggtggatcacaaggtcaggagttcaagaccagcctgactaacatgtgaaacccccgtctctattaaaaatgcaaaaagtagccaggcgtggtagcgtgcgcctataatcccagctactcaggaggctgaggcaggagaatcgcttgaacctgggaggtggaggttgcagtgagccaagatcgtgacactgcactccagcctgggcgacagagcgagactccgtctcaaaaagactgaggctggtgagtcgtgtaaggtacagacggagtttccacatctcaggaggtgggcattgcccatcctgtttcttccctttcctcttgcccctctgtctcctctgtgcttggtctctctgctttctccttaagtggtagccctaggtgaccactgacagaactatcttgtggaataagcaatggtgaaatgcacagacctttttattggttggacgtttgctcaggggattctaggaaaaccaatcatttcactgctgcaatcggtggatgcatttataaggagctcacggattggttgagtaatagaacctcttagaggagacctgtccagtcaagtgaggaaattatacacctaaatcagagcccaccccttcccctcttgctgcatgttatggtcactctttgggtgccaggaaccattttattcaaatctctcagagtcatcacctctctgctggcaatggctgggtgggcactacaaagacattttaggtatttgggacaaaatcggctccttcagaaagcaggatgcccgcacctgctagaaagcaggcagtgaccattggatttccctttgttaaagatgccaatttggttgccagttctctactgagcagtggaaactgaggaaccctacctcatacctgccccgagagagaccttagaccacacctgagggctggtaggaactgcattttgttaagaaagaaccgcatttccggaaggcatggagggagagatgaaggcccagtgtgttgtgaggtttcttgcccctgggttgggcaatttagatcaaagatcttccaactcctgtcttttttgtaagttgaaagctctttgaaccttcttttcttcaaaggcattacctacttttttttttcaaaggtgattatagctattatgattgcctcttaatagtttctctttctttgaaagaatttggtttaaataaatctacttaagccatgtttcaaattaactagaattaccaggagtaagatgtgatttaatcaggaggttttttttccctttcaaaaaaagcagtctgatgtctggtaagtttaatcttaaaatggaagagctgcaacttaggagagttttgcacttcagtattccaaaacaggttcacttgggcgttttgtgagattcattctgtagctctcagaaaattgagtcgtcgttggttgatatatttaccaaacctaattgagacagacccatgtgacattgctgggaggtggccttctctcaagttccacaattccaattataggcagatgtgtacagttttaataatttcaattatgaatgtgaagcaaactggttgtttctctacaaatatattttaaatcaaacccttttggctagatcaacataagttgcttaacatgcagattctctctcttccacctcccagatcctctgctaagttttcttcttgaaactgtgctcaagataaggccagactgttcccaaacttgcctgggatggtggagggtgatctggcctcttatctctctctctgccctcttctgagaacaagtccttctttctggacctcaggtctcagggtggtgaggaagtgaacagatcgaggcagccctttgctgtgaagggactgctttgagattaggaacagagtcttttgctttgatctcagaagtttagagataacaatttccaggactctgatgaaattgggcctccccagctattattgtgtttatttgatggtgctgtctctcacagtaggtgctcctcacacatttgtttgttcattaacattcttttaggttcattttcaaactgaaagccgtcaaacaaccctccaatttaaagcacaatactatttttcttgtccctcccacctttctttttgagatggagtctcgttctgtctcccaggctggagtgcagtggcgcagtcttggctcactgcaacttttgcctcttgggttcaggcagttctcctgcctcagcctcccgagtagctgggacaacaggtgtgcgcctccgcgcctggctaattttgtatttttagtagagacagggtttcgccatgttgcccagggtggttttgaactattggcctcaggtgatctgcctaccttggcctcccaaagtgttgggattacaggcatgggccactgtccccggcagatttttcttcttataaaaatattcacccccttttcttcccgtttcagtgatcctgaggggtggggtctgagaacagggtttctcaggttctttttaactgatatctcctcctaaggtgggaatccagagacagtcccacacccatgactcctgaaggacttatctgggacagggtttgtggggtctatgggtctggctgggttgatgggaaaggaaatggggtgtggggggagggttggggagggaagagtaagggagtcaaggaggagaaggggagggaggttaagggagaaatatggaatcataaaaaaacaaaagaagagctcagtgtttggacatgcagcatgcctggttggtttgcttgccattccctcttatagtttgggctgaagagtctgggtgatatttagagtcttcaagagttttctgagctctgcttagatgagattctttttagaaaagcttaacgcaatgacttttggaaaacattttggctgtgacatcttgatccatggtgtgcaattaacttcacagactggactgtatttctccttccctgagatttcctacaacgttcctaatggtcatgtgccttgcaggtggagacatgttagagtgaggtgagaatacattcgtgaaactggacataaatactgccgattgagaaagtgcgagagttttgttcaagactggaagcctgtctctgcctgagccctgcagcccgagtcttctgtttgtgggggatggaccataatatttacattgaagttcaaaggatgagctgcgatcttaattctgagatcaacaaagattaaggaaagattcagatgagggcataacagtaacagctctttaattacctgtcagtttcagtatctttaagatcaaaagataaacatggcgcagaaggcataatagacccaaagtcactcgatgcagtgggctttctcccccctcttcctgggcatcttaatcatccaggaacaaagcagtgccatgaggtcgcttagtctagtttgcattgccatctttctggtgctacttttccagccagcattcagggttgtttaaactgttgggtgtatttttcccctcttcaagtcactatatgtgctgcataacttagggggaatttttaaaagactttcatgaaacgaaaacattcagctgaaaaagtcaactgtaagtggctggattgcatgtcactgagggtgacacaggcagccagagagaatcaatcttccctcatcttttccccacttggcagcttgggagctaactcaaatcccctctgcttgttctttcttcctgccttcatcctagaaagcgaattctctctttttttcctggatgactcatttacaagattggatggaaataggttttagttcagcatactgtttgctctaactggctttaacagtgaggcccgatgtcaaatgctctcagctaagccagggaattcttttgccttgagtctcgtatccagacgttatggtttgcagctgctacagttttctttaggatgctaaatgatgtgttagcctgagagaatgtttcctttcctgctgccctttttatttttccttttgttcctccctcttcatttccgcagttttctaattcggagcttgttttgttcacctctctttgcagactttggtttgagcaactgcgcagggatcctgggttactcggatccgttcagcacacagtgtggcagccctgcctacgctgcacctgaactgctcgccaggaagaaatacggccccaaaatcgatgtctggtccatgtgagttatcaagcttctgaaagtcagtgttcctcctgctgtctccaccgtgccttccttatgaaatcatgcctgagtattggatggcatgtataggtgacaggcccaggagtatgtcatcagggattctttggggcctggctttccatctctgttccttctgtttttttctgcacaaactgtcagagtggcctttaccaaaattcactgcggtgctgagaagagaagaaaaccacgtcctgccctcacagagctcacattctggctctgcgactcatttatgccccatcctcctgcccttagcttcccatcgccctctgtgtgaagctccatcctgctgcctggcctgtgctccttgcgggacttgctcgcccatctctcctaccccctgtcctgctcacagttcttcagacatattgacctcccttttgtcgctcccacctctgggcttgtttttttttgaggcagagtctttctctgtcgcccaggctagagtgcagtcgtgtgatctcagctcactgcaacctccccttcccaggttcaagtgattaccctgcctcagcctcccaagtagctgagattacaggcatgcaccaccatgcccagctaatttttgtatttttagtggagacgaagtttcaccatgttggccaggctggtctcaaactcctgacctcaggtgaaccacccgcctcggcctcccaaagtgctggcattaccggcatgagccacgcgcccggccgttcactggtgatgcctggaatgtcctttcccagctctttggatggcctgcggattcccacatcccattctcaagccagtggcacctgcacattcccacatcccattctcaagccagtggcgcctgcgcattcccacatcccaggctcaagccagtggcgcctgcgcattcccatatcccagtctcaaaccagtggcgcctatgcattcccacagcccattctcaagccattggcgcctgcgcattcccacatcccaggctcaagccagtggcgcctgcgcattcccacatcccagtctcaagccagtggcgcctgcgcattcccacatcccagtctcaagccagtggcgcctgcgcattcccacatcccgggctcaagccagtggcgcctgcgcattcccacatcccggtctcaagccagtggcgcctgcgcattcccacatcccagtctcaagccagtggcgcctgcgcattcccacatcccattctcaagccaatggcgtcactgccgagatcatttctgagctccctgccagggagtcccccgtactctgtcctcacccttttaatttcgttctcggcacctctcaatgcctgtccttttcctgttttaaatccattcctctcctgtctccccagccagcaaggactctgcacgaagggagggaattggttggtctggttcaccattttgttcccagggtctggtacaggaagggccaccaggggtaagcacaataaatatttggaggatgaatcctcagttgcaccaaaggtagagcctgggtcccccatggtcacagtgagtcaccccctccaccatcccctgtcagtgatggtacagggtcagttcagagtcttggattcttggataggactcaatcctttgccatagggaaatgggctgtagagagagtgaggttctgattaagatatagacgagaaagactcgtttgcgtgaagggtgtgttgatccggagtatttctggaattcccctgcatctcttcatattcactgtaacccccttgtccaggttggcagaaaagctaacgcttacttagtgcttgatgtgtgccagacaccatgtcacttagtttcacaatgacccagtgcaatcattactctctattaccctattttatggaagaagaaacccatcataagagaaatgaataaaatcgcccaaggtcatagagctgctaagtggtagagtgggatttgaaccaagcagtgtcctttcagggtctcaagatacagccccagctctccaacgtggcgtgtggggacccttgcttgccctgtggcctcgctgaaggcatgcccgctcccctcctctccccatccattctctggctaacctggcattgtttcctattccctgaacacagcctgctcctgctacattccagcccttacatgcacagttccttcggcctggaaccctctctttttccctcttgtgttgttgggtgcaggttcctctgggcagccctctgtgtctccagctggctggctttgaggccctcccatgtaccctccagtgcctggctatctgtgttcctgggcctcaccgtgaggtctcagtccacctgctggaaccctctgggctgtagctgagggggcagggaccacttggctcactcccaggatttcctcagcacctggtggaacttggaggaagggagggaggagaaaaaggaggtgggaaggaggagagaggaaggagaaaggaaaggaaggacggagggagggaggaaggaagagaaaagggaaagagggacaggaggaaggagcaggcatttcatccagggaaacagaagctggaaggtcagggctgaagctggctgagaaagcaagcagaggaatgtgggtcagctcaaggctctagaagcgagatgagctcaggatgttccggttggagattgagaagaaacagaccagaatgagatgtggagagataaagaattcctggaactttcccagaaggggccgactcttctggaaccctggctaagaggacctgcttgtcagcgaggaggtgaaacacgtcaggaatcagctgctgctcctgagcgggctgggtgccctggttagtcacccctgaacctcaggacagtcctgtgagacacatctcttgcccccagtttgcacggatagaagagagtggtgagcactgcctagaggcacacacgagcccgaatgtagtggagccacactttgctgaaggctgggctcccagttactttgcaggtgtggtctggtgtgcaggctgcatatggggtgtgtgtggtgtgctgatgacgggcccaggtgggctggggtcatgtggagctagtggaatggagcagggagcagcagaggatgccttctcttctagggcattgctagtcatagacttcacttctgagaaggcctctgaatccccctcaacacagcccctcccggcagctaatgccagtggatcagagttgtatatgggaggaaatccattatggatttcttccaacccttaagaactctcaaaggtgtctggcacactgtcttccctcaataaatatgtattgagtggatgaatatgaatatgtgggtctataatcactttcttaacagttagagaagtcatttatgctaaatgggaagctatgagaggaagaatttgtgcacacacacacacacacacgcacacaaaagcacaaaaggctatgggagcctgaaagaccaagaggtcccctgtcttagtctgtcttttgttgctgcaagggaatacctgaggctgggtcattcataaggaaaagagctctatttggctcatggttctgcaggctgtacaagaagcatggtggcagcatcggcttctggtgaggccccaggccgcttccactcatggtgggaggtgcgggggaccagtgtgtgcagagatcacatggtgggagaggaagcaagagagaggggaggtgccaggctctttgtaatgatcagcatgtattgactcatcctatctgcctaacaacccttcaaggtagtgctgtattactcccaatttaaaggtgtggaaactgaggcatgaaagacctcagccacttgcccccatgacacagccagcgtgtgacagagccacgatttgacctacgtggtttgccctaggcccctgaatcaccaccctctactgcatctgtgatgttgtacttcctctggtggggtttacatgctagtgggacaaacagctggtattttaaaatgctataaactgagtgtggtaatggctgtggaggaagtgagagggattcagggaacaagatggagtggcctcttgaggagatgacttcaaagccagatcctaagaatgagaaggaaccagctatgggaagaggaaggtgtcagggaagaaggccaggaaaggtcaaaagtaaactggtgagaaaaaaaaccagattcttttgttatggcaaccctagcacatatggctgcacagctgggttaagtcaggaaggcatctgtagtcaagtatgatctgttcctcaaagatgagtggagacggccaggtggagaacaggtggggaaacgttccaggcagagggaacagcatatgcaaaaggctggtaggtgtgacacatctgatttctcttcctcttaattttggcgaaaacataaaacttcagcaccttttaagagatgaatttcctactgctttggggtctgagcaaactttctatctgtctaaacttggggtctgattttgtgtctgagatacaagttaggtttctgtttggtgcccatgactttgctggcagaagtggaaatggaaaaccaaaattgaatttaatgtagaaggctgtttaaaatgagagtgaaaatggaaccgattttcttgctgggttagacactgttattataaaatggcttctctctttatggctcagaaacaaaaacagaatgaagagttcacttccaaaaaagcaaactcccctccctggaggctttggacctgatggatggcagagactttatccacaacttctgagatagatttaggaagaaaatcagcctgtcattgaaagaaaccttgggaaagaaagctcttccctacaaatagggcccccaggaccctccgctagtgaagccataattaacaatggaaatgggaaatggcgcgctttcttgggggtttgtatttcttgggggttttccattattttcaatggtggttattttcaagaccgtaaagaatagctgtaaaataattcacttctttcctttaccccagattatatgtataaatatatatatatatataaaaataacatatagatgtgtgtgtctccaatgaactttgaggtttcagacacaaaaaccaaaaatattcattctggtgcattgaacttttattactgtgaattgacttttcctcagagtgacatatatgctaatttataacaactttaatgcagatgtgctttttaattgaaaagaatcaaaattaactttatcttcagaatattacaatactcatgtgcaaccttcagtgaatccctactggtaaggaaaacagaaattgagagttctataccgagaagattgagaatgcaacgttgttggactaaagctgtcctttgctctcatgggggtccctgggatggatgggtgaagtatttgcgtgagggcctggtgcctcctggagagtcacacacaacacactcagtccaccttcctagctcagtgaatctgttttcacatagtggaaaaaaaaatccctgtctccagtgctgtacctgtgggtggacaactcggccaagaggcaccatgtctccaaatagctctcctgtctccatatagaactgggtgttcaggagggagagtgagagaatttgttctaggcctcagactcagtgttttgtaaaagtactaccagatatcatcagctactggcaggggtcaaatacagaaggatggtattagtgttttctctgtgttgagaccctctcaaaatgaaggctagcaggaggcagtgggaagagtaaagctatgactcctttggggaaccttaggccttttgacttttgagagagaggtttcccttagcttctgagattattcagttataaagtacgagattttttttttatagctagcatgtatatttaacatagagtaaaggaaggaaggaaaggaaaagaaacaaccattttgaaatccgcaagaaaataatttcttgctaaacatagaccatttaatggaacagtggtgagatctgagattttccaaatggatgaattggttcctagtctactttcttttttttttttcctagtctactttcaaggccttaaattggaagttatattattaaaagttgatactgaaagatggaaagatattgctttcaggtggaagttatttttaatttttccaaggcatttcctttcttggagagccacacagaagcaaggtgcatctcccgaaggtcctcttggctgcactctgtgtaaactgggcagtttccgaggctcctgtccacatgccccttaagaacgagtaatcagaccttccctccacctgccggggtggctctgtccattgctttgtcccttgcatcttgttaaaattgccagcgacttctccagggagcagtgactccatgtctttcctctttgggatggcaggtgataccacaacttttcctccagggagtatttttttttgtgtaccagactaaatatcaggatggccatttggcttttgacttaactccaagctttcccgtttgtatttcataagtaagggcccttttcctcttctttcagctgccgcccccaccccccacccagtgtctgcctttcttcctcttttgagatcagagtattctatgctgcctagtatctttgggttttcttctgtcctgcgatagctcatccttatttcattctgctggaaaaacccctggtcgtatttgattgttgccctctcttgtcccagtctctcatccctctcatttgttaagactgtctttgattcttgggaatcccatgtctgccacggagaatccagaaagcccctgggccatatttcaaaagacccatcaggaaattctgaacatgttttgaaactcctactaattctatgggattacagaggtttataaactgcattccacatttttcccttggtatcctcacatacttctgaaatgtcagatggactaggtttctctttatccagatattaaacatgtatggaaactccgggggagaggaattaagatgcttaatctggtttccctttttaaaatctcctagctaggagtgtttgactgttcacataggtttccattcttttttttttttttttgggatggagtttcgctcttgttgcccaggcaatggcgcaatctctgcttaccacaacctccaactcccgggttcaagagattctcctgcctcagcctccaaagtagctgggaatataggcatgcaccgccaagcccagctcattatgtatttttagtagagatggggtttctccatgttggtcaggctggtgtcgaacttctgacctctggtgatccgcccacctcagcctcctgaaatgctgggattacaggcgtgagccactgtgcccggccaggtttccactcttatttggcaatacagtacaaataaaactgtagctttttccctcttattttaagaaaggttttttgatgaaacaatagatcacaatttatcaagcttaatttattccaactacagaattcaggtctttctgtggcttagttgatgtgagcctcatacgatctgagaggtaggtactattattatccacatcttatggatgagagaccctaggatgagagaggtgggtcctctttaaggatttgtgacaattttttttttcattgatgataaattcctccaaaagaaatggaattctggaatcagtttgtaaagtcatcaattaaagttactacaaaaactgcttgctcaaccctgaccagacctgccacctggatggctctggcgccatcttgaagacaagcatctgttaatcttatctgtggtcccagccagatgatggagagaggcaaagaccagtgtaatatgcagtgacttgaggagatttttggcgtctgttgaagccagttggtgacaagaaggcaagcagtttggtgtctcagggtctccttcaagaaagaaacattcataaaggctttagagttgctcctctggcctcatatggtctccaaacccctttagtggggttgtcctcccattatcatgatgtcctacttcctagaggcatctgcactatacgacacccccacctgggacaggaagctaggtgtgccgtaaagattaaagggaatataaaaggtcgtagagcagtggtctgcacatttgagtattatacactgtgtttttaaaggaagaacgttctcgataactgtgtgtgttgacgtgagttatttttatttaaatgttagttataagtacatgagccccaaatcaaactccttttatttatggccctgtacaactgaaaaaccaaaactcatttacaggttaaatagaaccaagagtaaaagaaccccagaatattcaaattagcaacgttaatgcaatggctaatgttttgtgggaagggaatggctgtacacagcatgagtgcagttctcactgctgggcacaggttctttgagcttgtcaggcccatcttgtgatgccacacctcccctaaaacttttcattcttccagggctttccaattttttgagtacgcatcagaagcacctggagggcttgcaaaaacactgcagagtttctgattccggagatgtgcagtggcatccaggaatgtgcgttttctttctttttcttttctttttttttaagagtcagggtcttgctctgttgcccaagctggagtgcagtggcacacttacatctcactgcagccccaacctcctgggctcaagtgatcctcacacctcagccccccaagtagttgggacttacaggcgcatgccaccatgcctggctaattttggtattttttgtagaaatggggtctcaccatgttgcccgcccaggctgatctcgaactcctgagctcaagagagccacccgcctcagcctcccaaattgctggaattacaggtgtgagccattgcgcctggctgaatgtgcattttcaacaagttctcaggtagtgctgatgccactggtctgaggacgaaccacacgctattccagtcaccaggagactttccactgacagaagcacagatgcatcactgacacattaagtccacctctgcttccttctcattaggctatgacaataaaagtgatttttttttttttggcaaaaatagtgcattgataaagaaataccaaagcagggccgggcgcggtgctcacgcctgtaatcccagcactttgggagaccgagacgggtggatcacgaggtcaggagatcgagaccatcctggctaacacagtgaaaccccgtctctacgaaaaaaaaaaaaaaaatagccaggcctggtggcaggcgcctgtagtcccagctactcgggaggctgaggcaggagaatggcgtgaacccgggaggcagagcttgcagtgagccgagatcgcgccactctactccagcctgggcgatggagcgagactccgtctcaaaaaagaaaaagaaataccaaggcagacactgaaattgggtgtgtgtggtggaaggtgttcttagttatatggtggtcatccaatgcctctggttatgctttgtgaaatgttttagtcaattaccaaaaagaaaataaaaattagaactgttgcacccgtgaggatgtgtctgtgtacctcagtttgagaaacactgaatgagttaggcattatgaagcacttactgcggaaaaaaatgatattgtataagtagcaggctcttcagctttaggtgtgaatgttagagccaagattaggcactcagaggtggtgagcagggacagaatcttggttttgttttttcctccccttaactcaattcactccaactctgttgaaatatgaggtctttgctatgtagcatggaaacattgaagctcattaactgcatgaacctgctggtgtatattcagggcagaggactgggttgttgaggagactctcaatcatgtcaaataaagcacaggcaaaagacctgaggtcccagcctggggaagacccagaaaggtgggaagatcctggttccagttttcaaagatgtgaagtgctgatcatggaagagcaactggtcttgttccacaaccaatgaatagaagatgtagacattggcttagccttggaaagctttatttttgcatagaatcgccctggatggaacaggctggctcagaagcattgggaacagcttgtctcagaggctgttcagtggtccccagcaacaactttgtgggatgtgccagaaggtttccatccataaaagcgatgtgtccaagtcctctttgtatgcaaaactctacaattttgggacccttttagcattccttcttaccgatctccaagaatttttcgaagcaagagtgtttagctctacctcaaacatactcaaagtgcagcatcgcatagtacgttctcaaatatatcactagccctgatactccttccctgcacccctaacctgtctctcctcctcagcctcctcagtaccattctgttaccaccattggtcctgcattctgagtttgccacctggcacgtgcccttcaaatgtctccactgcgtctttgcctttccctttctgttgcgtgccatcattccgattccgattttaacagcaacctgctgatttcctgccatagtttcctactttccattctgagcccctttaatccacttatacaatataactactccctgaattatttggtcataccacttgtatctgccgaacccctattcctcccctggggtacgttttccactaaacacacacagggaaatgccacccaaatagctctatgtgtgccttgttcattcttgtttccatttctttgtttatgcactttttatctctccatccatacaaccagccagccaaagacacatgagctcacacacatgcagtcactacctgtgtggcatgttccctcttcatgtacctgtttctaagttctcagtctcccttcattgcactcctcttgtggtcaaaagtggtgcaattcagcattttcttattccttttgcactcatcaccgcttgaaaggactgtgctcatctatttgtttgcacgttgcttgcctgtcttcttccccactcaaaacccaagagggcaggtctttctctggtccccagtacccagcacctatagtcttgcctggggcagagagccatccagcaagtatttgtggaatggatgtttatgcatctgtccccctaactccactgtgagtttggaactaactccactgtgagtgggaaccaggtcttactatatgtctgaaatttgcgaatgatttctagtgggagcggtgggctccagtacctgtcattatctgaaatgccataattcagaggtgcctctgtggaattgggcctcgagggtcttaatttcaatcagtctcattggatttgttttgactagaaatcttagtgcctgtttttaaagtatattcccttgggcgcttttgaacacttgagacctcttggtaggcaggcatttcatcctcatcaggaaatctcatcaaaatgatattagatttacacatcaggaaaataaagatcctctaagaagatgtttctattctgtagattggctttggataggtgcagttaagcttactcagaaggtatttcaaccacatctgagatgttgggttggggccaggtggcagaatctcacaataaacaataaaaaaatcagggcaggaaggaaggggacctccccagaaatttctgtagttacaagccaaggcaaaatttaagagtagagcaaaacgccaggttttgttatgaggcttcgtttctgagggctgagtggtaacctggctcacagtttggctgtgactggagcttccactgtagggggcttttcctgtattgtttggtcagccttttccaggtaccaccttgtaagccatccttggaaaaccacataatggcagtactactcttaattgaagtccctgatgtctcccaggtgtttcttacattgcttggtctgggcctccttgttgttgacttcttcctgccataacattcggagagagcagagggccatggttcccctcctcaggaggtggctcctgatgctcttgaaactcctgcttttctctgtggtccccttccgggtcttcacattcaagtgctctcacccaagactttctttctttctttctttctttttttttgagacggaatttcactcttgacgctcaggctggagtgcaatggcgtgatcttggctcagtgcaacctccgcctcctgggttcaagtgattctcctgcctcagcctccccagtagctgggattacaggcgcccgccaccacgcctggctaatttttgtatttttagtagagatgggtgccagggtgtgcgggggcttcatgcacagcttgtagcacagcagcgagatagtggtccaggctgatgaggcagagattgaggatggaggtgctacacaggctggtctcgaactcctgacctcagatgatccacctcccaaagtgctgggattacaggcatgagccaccatgtccgacctcacccaactctttcaacatgacactgagcattctacaaagatgactttgaagagggcctgttgaggttggcatggaagcagcagctcccacgcttcggtgaagcccgtgtccccagtcttcccctccccaggggacctgactccgctttcatgtgtatgtctctcttttcagaggtgtgaacatgtatgccatgttgaccgggacgctgcctttcacggtggagcctttcagcctgagggctttgtaccagaagatggtagacaaagaaatgaaccccctccccactcagctctccacaggtaatgcaccagctgctctagatcacggttcaggactgctgtcgtgaccagttcgggtctacctgtgaaacagtatttgttttgcagtaatggtgttatgtctatcccatggttataagtttctttctagtgttaaatagaagtgtcaaggggtggttgggtttcccgtctctcaatggccactcatgcctttcacctgtatcctttcctgttctgttctatctgaacccctaacttctccttcctccttctgcacaaaacacgtagatccaaaggatctgatattctccatttaaaaaatgattgcaggcttgattgttttaaaactcaccatcttatgatgctgacttggaaaagagggtttatggtcgcatttccaatatggcttctttctgcaattactgtcaagaaatgtttgttgcattcaagttggggctgtgatttgttttgtgagttgaggttttgagcccgttcaaaagcttttaaatatatagaggttaagttacttgattggactgaatcatcaggtgtgtttgaaaagttctctcaagctttagctggttcacatttcagtaaacagtttgtattaaggtttggtttcagatccagtaaatcagtacaatttgttcttttgtttggttcacaattcaagtcctggccttggcttggctttgatgagcatttaattggctccttagaataaactcagcttcactaagataaggcttttgaccaaagaagaaagcagttatttaactgcaacttatgatacttagcgatagttaaaatatagcattttattttactactgttatgcatttttcttctgagtttaaaagcatgcatgaagctgcccctgaatttatcttggcaagtggaatccaagtggagacacgttcttgtatgcaattatctaattcagcccatactgtcacctcaagggaggggagactctctggaggcttgaaagcaaaggaggcattaagtccttgggaagatgagttacagctctgtcattatacaagaaatatttctgcactgagagtcataactcttggagttagaaaatgtgcaaaatgtcaaaccaattgtcatatttaagttttagagctttcagaaatgttgaaagtgcggcagagcactctgaggtgtgcccattcattcattcattccatatttcatactcattagcttattccgtgaatatgtgttgtgcaccaattatgtgctaggtgtgttctagattaagcaagacagagaacaaaccagtctctacccttataaagcttatatatcagcaggggaagctaaaaataaataaatgggtaataaacatgtgtggtatttggtaatgttaagtgctctaaagaaagtaaaataaattgggacaaggggatagagagtaaaaaggtttttttttttttaacaaataagattattttaaaaacttttcattgtgatgtaattgtagatgcacacacaattgctagaaataatacaaagagatccaaacagccttcatctggtgtactagtccattctcatgctgctaataaagacatacccgagactgggtaatttataaaggaaagaggtttaatagactcacagttccacatggctggggaggcctcataatcatggtggaatatgaaggaagagcaaagggacatcttagatggtggcagggaagagcgcttgtgcaggggaaatcctatttataaaaccatcagatctcgtgagacttattcactaccatgagaacagcatgaactgcctccatgattcaattatctccacctggccccgcccttgacatgtggggattattacaattcaaggtgagatttgggttgggacacagccaaaccatatcacccagtttcccccaatagtaatatattgtataactgtggtataatatcaccactgggaaattaacattgataaaacccattgaccttgttcagatttcacaagttttatgtacaatcttgtgtgttgctgtatattagttctatagagttttttcacatgagtaatttgtgtgacagccaccacagtcaagatgcaagacagttccctcacaaggatccctcgtgctgctcctctgtagccacagctaccttccttcctcctgctctccctaagccctgtcagccactaccctgtatcatctataattttgtcatttcaaaaatgctatatgtaaatcactttttttcccactcagcataattcccttgagataatctgagctgttttttttttattggtgagtagtatctcctggtgtggatataccgcagtttgtttcaccatttacccactgaaggaccgttgagttgtttccagtttggggctatcatgaataaagatgctgtaaacattcatgtttaagtttttctgagaatatggtttcatttctctgggacaaatgcctaagagtgaaattgctgggttgggtagtaagcacgtatttagttttgtaagaaactgccaagcctctttttcagagtggctggaccattttgcattcccactagcaatatgtgcatgatctctgcatccttgccagcatttgatgctattattattttttattttagttgttctgataggggtctaataatatctcattgcagtacaaataagatgtgatgtttccaaatagatgcagtctttcaaagcagtctctgtaggggttatatagtcataaatattgccatctctcagagtgattccaaagtttctttgagggttcagagcctgttttattcaagtgacccataacaaaggacaaaaggaggatgaatgtacccccacagtggggaaaggcagacagtgctctctttgaacccgatgacagcctgaggagctggagaactgctgatctgctgccatttcattgtattagtcagaatagaccaggttatgctgcagtaacaatcagcccccaagtcttagtggctcaggaccacaaaggtttatttctcagtcatgctacatctcagttgagagctggatcaaacattgaaaggttctgcccagccaagggcccaaggctgatggagcagccaccacttccaacatttctggttcatgcagagggagaaagggaaagagaaagagaagttctttcgccagcaattaaatcttccaccaatcttccagttgtaagtggaagctttctaaaacatggcatgcggcttcacccaactaaagagaatggggcagtgcaaccttaccatgtgcgttgaaagtgaaaagccagaaatatttgttgattagcattagcatgagccccacacagctgtgggaaaaggagcagacaagcgcaggtaggttagtaacacaagaaaatcaatctcattgcttcagaaccataccttgtttttactttcaataacatcacgcagtcttagcaggctgggctctaagtgttttttgtgaaaattaaatttaaccttaaagaagcaggagttgcagttctgaagatgttaaaaaatggtccaaagttagtcccaaaggagacatattaaaaatgttcccagcaatttcagcatcactggaattgctgtccaacctcgcatagctcctgcattgagcagacagctttgccttggccttaagctctgtgtgtgcttgttaaagatcttcacattcctacaggactttgttgtcttcacttgtcaagcatgaattgcatttctatatctgattttctaattagggaatctgatgctctccccatctcctcctttttaaaataactattgggatatagaaatatcttttttcaactaggattgaaatcctttgagccaggtgtcaagtgaggtgtttgcacatgatagacactcagggaatctaggttgctgactctggtgttaatgtgtctgtgtgacctggaaaggtggcccatagattattttgattactcaggattgggaattgtcctgacccagtagggcccagagcagtgcaccagctgctgaggcagcccagggcatcttatctggttcatagagtgaatgtcttcaggtttgaggatcagctgctgcccttctgacagcctcccattttttcaatcctttgcaccccgctaagtttatctcctctcccttccaaccagcctggccctgcttatatccaaaaatactagtttaccagtaacatgagtagctgccacttattgaataatcctttgtaggtgtttttcatgtggtgttgtttttatacaatcctgcaaggtaagtccctgtttaccagtgaggaaattgagtctcagagagattaagtctgcttgactgaaaacctagattttcctaccatgctgtgttatttcactcttctctgattttatttagtataagacgcaccccccctacaaaaagttggaggtattatctattgtctctatgaccttatgttttgagtaatgtcaatccaaatagaaaatatgccagttttattgtgtctcactaatgcacatctttattaattggatgactctgtcattcatatttgtttttgtttttgtttaagacaaggtttcactgtgtcatcctggctggagtgcagtggcacaatcatggctcactgcagcctcggcctccgaaaccaagcagtcttcccgcctcagcctcccaagtagctgggactgcaggcgcatgccaccatgcccagctaattttttttggtggggggtatattttttatagagagagggtctccctatgttgctcaagctggtcttgaactcctgggctcaagcaatcctcctgcgtcggactctcaaactgctggggtactgcacctggccctgtcactcatatatgtaatgatcatatctattaattcttcggctctttttaaagattaagttggaagaatttttaccaaacttgagttgaaaacagcattattgcccttgtgaatccacagaacatgcttccaaagaactgcccttcattcatctctgtcatgccgtttgcaaacttaagcttcgagggcctttctaagtctctcttctacacactttctttttgcttgttggcacttgtatgtcacagagtagcgaatgccttttatggctgagcagtttttcagactgttaccttttcatcactacacctcaacactagcatttataatacattccaagcagtcacttcaggttatgatggttttgtgctgtgaattctccaaagtcaaactggaggagaagcgttagcttttatgagggttgagtcagtgctaattacgatgtccaagaaggcacaatgatcagattatcaaataattttttagcttgggaagtgatgaggagggagcttcaagtggggaggggtctctatttgcatctatcaggctacactaatgtgaaaagtctgatgacagacctgcagccctttcacttggtacagtgttcaggtgctcacacaagccagtccagactttggaaagctgatggttcatgaaagaaagtggggtttgcgatggaggaaggtgttctgtgtgttacgttgagcagggtggtactatttttccaggcttcagtggagaacctaagtgttatctcagaggggtggagggtggcgtgtggcctgtggccatgcctggcatggctttccaggatggtgaggaatattttaatctcttttgcccataaggcaggggttttcaggaccctaaaacaaacttcaaagagctctaaggacttctcaaagtcctttttggatagtaatgcaatgtctgtgacgtccaaaggaagaaaattcgtcagcggagatttgaactaaaattacttgtgctcatcagcagtttttgaagatgcagagcgctcggttatgaaaatagaacaaaaatgcacatctagtttgtccttagcacttctggttcatcatactttgaaaaagcctggcctgttgcccaagtcttttgaggcaaccctgggttgttgcccaagtcctttgagggtaagcaacagcaatgtctcagaaaacattaactcaacagcccacccgctccaattcattaagccctcatcttttttatctgaccaatagatgcccccagttaagatctaaatgactcttccaatgcagggttgttaaaggaagggagatagacattctgaaaagcagagatctgtttgattttcgggttattatagaacatggatggagctggaggccatcatccttagcaaactaacacgggaacagaaaaccaaataccgcatgttctcacttagaagtgggagctaagtaatgagaactcatggacacaaagaggggaacaatagacactggggcccacttgagggtggagggtggaaggagagagaggagcaaaaaaaaaaaaaacctattgggtaccaggattagtacctgggtgatgaaataatctgtacaacaaactcccatgacatgagtttacctatataacaaacctgcacatgtacccccgaacctaaagtaaaagttaaaaaaaaattttttttaaagtacgttgctggaaagttttagctgagtatccagcgataacacttacagtggtaaatgtacctcatggcctctacacatgcatttctacccacctcactgttctttgtttttctttttttttttttttttttaattttgagacggattctctctctcttacccaggctggagtgcaatggcgtgatctcagctcactgcaaactctgcctcctgagttcaagcaattctaccacctccgcctcccgagtagctgggattacaggcatgcaccaccacacccggctaatttttgtatttttagtagagacggggtttcgccatgttgatcaggctggtcttgaactcctgacctcaggtgatccactcacctcgtcctcccaaagtgctgggattacagttgtgagccactgctcctggcaatatttccttttttcaaaatttcagtacgtatttgaggaacaggtggtgtttggttacatggataagttccttagtggcgatttctgagatttgggtgcatccatcgcctgagcagtgtacactgtacccaatgtgtagtctattatcccctgcccctctcctacccttccctccaagtccccaaagtctattgtatcattcttatgcctttgcaccttcatagcttagctcccacttacgagtgagaatacacaatgtttggtttttccattcctgggttacttcacttagaataatggtctccaactccatccaggttgctgtgaatgccattagtttgctcctttttatgactgagtagtattccttggtgtttatatatatgacatgtatatatatatgtcacattttctttatccacttgttaattgatgggaatttgggctggttccatatttttgcaattgtgaattgtgctgctataaacatgtgtgcaagtgtctttttcatgtaatgacctattttcctttgggtagatacccagtagagactacccactattgaaagggagatgacctggtaacctcttcaacagtatgggaacccaccctggtggtgggttgaccatggaggttgacctggctgcatgacctagcaaagattgtttctcttgagttgattctggcatcacaactggccccttttttgatggcctcatttttaccctgcagaaaatgagttgacaaaaggctcagcatttcctcaagaacaatgttcaaatgacaacttaaagcttttgagaaagtaggacattttatggcttctccttgcaaagaagattactttagaaaactgaaaaaataactttgaagagaaggatagaaaaatcgggggaccaagcacattattattttctgggatctattatttggtatgttggaaatcaagtacaaagctacgtaaaagaattcttcatattgcaaaaacattaccgcaatactttgtaaaataagggctatagcataagaaaagatcacagtcccacaactcaagcaagacagaccgtctgcattttgaagtcatccctgccattctttgcccacatgtgggtatgctgtatattcttctgctgaacaattttgcagccttagaagggccttcatgggttgggtgtggtggcttacacacttaatcccaacactttgggaggctgaggcaggaggatcgcttgagctcaggggtttgagaccagcctgggcaacatggcaaaaccccatctctaccaaaaaaataaaaaaagtatccaggtgtgacggtgcatgcctgtagtctcacctacttggaaggctgaggtgggaaggtcacctgagccagagagatcaaggctgcagtgagccatgatggcacaactgcactccagcctgggcgacagtgtgagactctgtctccaaaatataaaaaataatgaataaaataaatacaaaataaaaggcttcgtgtgcattataaacgcatttttacctctcatacagttgtttccgttgttataatcttaaaggatgcaaatgttctgcttagagatgaattagcttcttatctccagtgcttgaatggacaagtgctctgtaaatatttgtgaaatgaaaggaaacccagggcatttaaaacattatttttggccaggcgtggtggctcaggcctataatcccagcactttgggaggctgaggcggggaggtgggcggcggtgcagaatggctttaaaggaaaggatcagaaagcaggacctctctggccccttgagactctgagtgtcctgtggtgcccagttgagaggtctaacttaggatgcctgtacacttctggcttctccctgagtgctcaaaaacctaccttgcgagcaggcattttctgtttattttctttcattcctacaagcctgtcaatagtgcatctctttggctcacctatgagcaacaagaaaagaccacaggttgtcttgggaaacacggaatggggagacccaaactggttcttgctgtatcatgtaccagttgctccccttggacagagaaattaaattctttggctatgtggtgtgtattttttaaagagagagagggggaaatgggattttccacacccctcctgtctgaagggaggtggggctgaaaccaagctccacgattcattgaatcggaaccctgcccagagacctagagaagagatcaccccagcagtgactcgggatgggcaggcaaggtggcgagtcccctgtgatggtggctttcactggtgtctgcgttcagcctgtaacatgcgtgcattctttcccaaatgtctcccaggtgccatcagtttcctgcgctctctcctggaaccggatcctgtgaagaggccaaatattcagcaggcactggcgaatcgctggcttaatgagaattacacgggcaaagtgccctgtaatgtcacctatcccaacaggtaatttcgtgcacccagaggaactcctcgggagagacggggcctgtcctactagccctgagcagttccggacagaaagctgtccgtgattgaaggaaaagccgcgctctctcttggctatctccccttccccctaacacccacacccacacatccacaagaggaagcgtagacagggccaccatgtgctgttatgccgtgtgccctgcaggggcacctggaggagaggtgagtggaggctgatatccaggctttgagggtctgtatcttcccaggggttgcctttttctagttcacacagagggacctttgagactagctgtggcccgagtgtgtgtgtgtgtgtgtgtgtgtgtgtgtgtgtgtgtgagagagagagagtgagtgtctatgtctgcttgggtctccatgtgcatgggtgttgtgtctgtgtgtgtgtatgtgttgtgtgtaaatttgtgtgtgtgtgtgtgtgtgtgtgtgtgtgtgtatgtctttgttttgtttttttaatacatagtctggctctgtcacccaggctggagtgcagtggcgtaatctcagatcactgcaacctctgcctcctggtttcaagcgattcttatgcctcagcctcctgaggagctgggattacaggaacgtgccaccacaccaggctaattttgtatttttagtagagacggggtttcacctcttgcccaggctggtcttgaactcctgacctcaagtgatccgcctgccttggcctcccaaagtgctgggatttcatgtgtgagccaacgtgcccggccagtccttgtgttgtgagtgtgtttgcgtgtgtgtgatcagctcacgagcccacctgccaacatcaaacagaaacatgggatcgcccctccctttccaaaccacccttagatgccttcttctgccttgttcttgatgtttatttcagccctaagacccctgccttaaaatgtgggaggcaggaaggaaaggcataggagtcattcgttttaggccgggtgtccctatgaactttccgtgaaggcttcactttatcagtttccatgaggagggttctttaagcaaagcttgcagacaggaacccacagcataggagcactgatgggctccctgtgcagcccacgcttctccatgctggtgcgctaactacagattaaaaaacatttctcttttttcttttttttttttttgagacaaaaccttactctgtcacccaggctagagtgtagtggcatggtcatggctcgctacagcctccacctcctgagctcaagggagtctcccacctcagcctcctgagtagctgtgaccacaggcatgagccaccatgtcaggcacattttctatttttcttcagagacagggttttgccatgttgcccaggctggtctcaaactcctgggctcaagtgatcctcctgcctctcaaggtgctgagattacaggcttgagccactgtgcccggccaaaaacatttccttgtatatttttttctactcatttgtcctatttctaactaacctgagcgagggaatgagggcccttattttggctgtttttgagcaaacaaggaaaccacgtgggttcagtaccttccaagactgggacccaccttccttcttccttcagacctagggtggcttgcacatttgaccaggcttggatgaagacaagagaaccactgacccagaggggcagataggagactgaaagggcagagaaaggggtgtcctgtgtggtcataggttcaatgcctaggaaggtctagaaacacccaccaagccttatgaaagcagaagtgctgagtccttcaaagaagatggccaggcagggctctgcttgggatggaagctctagaaaaactttaaaggggcgtgggagtctgcatccacacttcagtgccaaatttacactcaccgtgcccagagaggaggtggtttcactccgttgccatctagaattctagcatttggctcatgggaggtaatttaaacaaagtctaggtgacttaggttaccaagggaacctggaaatagattgctgttttccaataacagctcgatgtgggccaggatctgaaacagacaccagaaatactactccaaagcgaggcagggagcaaagctgaaaggaccttgcctcattatccatactcatgatggagagcagcacgcaggtatgctttctgttaaaggagggggccttgctggtggccacatgagtcattaagctcatgtaatcaccgcctaaatgagcataatcaatccactcaatgcggcaactgttgaaggaagtggagttggtgttagacagtatttcccctccttgttggctgcatcttcattcacaaagaattacgaggcgacatctcattttgtagctttcccacagtttgcagacaggctttgatagattaaaacttataaaacaggataggcaactcctatcctgttgttgccagattattgtaatggtttttgcatttggacttggtcagaagcataatggctgcacatgaaactggttaagtggattgtaaaactggctgagatctcacatgctcaggaaaacagcactcagtgtcttctgtgtgtataaggcccattgctgattttacactagaggcaaatcagtgtttggtttttaagcgtggaaccagaattctttttctttatttttatttatttattatttatttattttgagacagagtcttgatctgtcgcccaggctggagtgcagtggtgcaatctcggctcactgcaacctccgcctcctgggatcaagcgattctcctgcctcagcctcctgagtagctgggattagtgccaccacgcccggctagtttttgtatttttagtagagatgaggtttcaccatgttgcccaggctggtcataaactcctggcctcaagtgatccgcctgctgcagcctcccaaagtgctgggattataggcgtgagccaccaccgtgcctggcctggaaccagaattctaggctgttgggggaggtacatgttatttacagtgtttattttgaaaaacatttatctttaagacaaaaaaaatgtattttttatatttatttttctggttttactggcatgtagataaagggagtgagaacatacaaacagagaaagggatattttctttataaagtatgttttatagtttcccaacatacctagccccagatgtattttaagtgttgtcaatatttttcttttgagaaagttaggaaaataaaggtctcgtattttacatcactcttctataaagccttctcctgtgaagtcatttcagcctccaagttgatctctaaaagcaaagagggaaatgtctttggaagtaaattttttataaataaatgtttatgccagtcagtcaacagatgtttgctaggtgccagctcccctcctgatccaggtgcagactttttttttttttttttgagacaagtcttccttcatagcccaggctagagttcagtggcgcaatcacagctcactgtgacctagaactcctgggctcgagtaaccttcacgcctcagcttctatagtagagggactacaggcatgtgctaccatcgccagctaagtgtttctatttttgttgtagagatgggggtttttctgtgttgcccaggctggtcttaaactcctggctccaagcactctctgtgcctcagtctcctaaagtgctgggtttcagacttttgtacagagccaagcttgctgcctctttctgtctccctgcaggggcctggacagtctctccacccctccagttagctttggaactggtgggaggggaggaggtcgcaggcaatacaggacagaattagaccaaattagatccatggtatcaaaatggattgcatgtgaatttgctcaattcaaattatatctagtattctggaacattgtaccattctctgtgtcatccaaacatgaagccatatacagattggttaagtgatacttgaaagcatcaggtttatgcatggtttataggaaaacatttaaactattcctctcagtccagagtcagttgaccatttacattttggcagagctcgtttttgaagatactggacataaaaggcagagatggggtgtctgcccctgtgcacacctctcctttccatgctgctgacttttcttccagaacaccccataccctcggcgggtgcactgctcttgggattcccaggtatttccaaaccactgttccctctgcattgttttggtagacctcaagtagttattttaataaacaaacttgttattaatacactttttaagccagtaatcgtgccaatccctctcccacatgttatctggaatgtgtaattttgtgacaaacaggaatgaggaaggctgatctcattgtttgttgggtgtgttttcatttgtttgtcttttgggacagcacttaggcaaaagtagtggagggagaactgatgtaggttacaccgaccggtggcaggcaatggtcaggagacctcgttctgctctcggtgcccctgccaaccggccgtgtgcagtgggcaagttctcttcttacagaagaacttgcaaagtctcctcttctttacaattatggggctacctctctgggcattatggttctgaggttctatccaaatgtcttcagaccccttgacatggaggctagtggctctccagccagataacttgccttctgctccgattgccctctttgtatcactctttttatttatttattatacttttattatactttttaatttttttattatacttttaagttctagggtacatgtgcacaacgtgcaggtttgttacatatatatacatgtgccatgttggtttgctgcacccattaactcgtcatttgcattaggtatatctcctaatactatctctcccccttccccaccacaggccctggtgtgtgatgttccccaccctgtgtccaagtgttcttattgttcaattcccacctatgagtgagaagatgcggtgtttggttttctgtccttgcgatagtttgttcagaatgccatcattctttgtatcactcttaagggatttagaatgttcttttgacacagccccactaccaacacatacactcccttagagccctccccctgatttctcagtctccatagccattggatgatggtgatggtggtggtgatgatgatgatgatgatgatgatgatggatgtgtctgtttatttgggaagcagtgagcatctagacactgaacccggctgccggttcttaattctagggctgtcacttcctgcctgtgtgaccctgggcaaggtactgcattgctgtgggctttggttttgttatctgtaaagttggggtcatgatagtacctactcataggactatcaggatgactaagtgaatttacatcctctcttccccactgggagggtgaacaaatgaatgcgtagatgaatgaagcccggtatttctttgccattttatcccaaggagtttatcttcacagtccccttgtgaagtagctttaactctcttcctctgagaggaccccactttgccgctgagccctgaaccccccatgtatgaacttatgaactctttctgttcccctaaacatgatctggctagttcctgaataccttccttttccaccccaaaatccagagtcagagtggcttctgtccatgacaaccaatacattttaaggaaagaatgtgtgatcataaggaaatctgggggacagttgggagatttgagtataatctgggtattagatgctattaagtgattattaaaattttattgggtatgttgatggtattgcggttctgtgggggacatctttggtttttgaaggtgcacactcaagggttaaggggtaaaatgtcatgatgtttgtaatttaaaatacttcagcaaaaaaaaaatgcaaggatggcaaagtgatcactggtatatctagatgatggtatacataaagtgattgtactattccctccgcttttctgaatacgagaacattttcaaaataaaaactcaagtcagtgaatgaatgagtgaatgaatgaagctgattgtgcccagggggtctgtgtggggctctccgtgaagtgcaggggtgactggtcctctctctctgcacctcgcaggatttctctggaagatctgagcccgagcgtcgtgctgcacatgaccgagaagctgggttacaagaacagcgacgtgatcaacactgtgctctccaaccgcgcctgccacatcctggccatctacttcctcttaaacaagaaactggagcgctatttgtcaggggtaagtgcgaccctagaggcgatcgtctctgctgtctgtggaaaaaagagctcctacacccaaagtgcttctcagttgctgacacttgatccaagctgctaatttaatctaatgtgaggctgagttttctgaatgtgggataaagtcgtagctaaacctgcttctcagggagtgccttttatctgcaatgtttttcaaatactctcccaccgagttaagccctgggcagaattgggaggggttcaagcctctttttccttcaacagcatctctgttgtcttttttttttttgttctgctgcctcttaggtctttgggttccccatgttggaggcattggagggttctctggtcctaaaactcgggtagcagtgcctcccgggcatttgtctctgaactatggtattatatatgagaaagccactatttaggtttaacttctccagaaaataagaacaaaattggacttgcctggcctgactctggcaccttccctcagtctgagtgtcagaaagtccaagtgtctggtgtcacccgcgaggtacctttggggtttccacagcgtggggtggatggtgggaccctgacaccctgtccccttcatcatttttgccacaagcagtttctgtgtgcctgagtaagagaatttatgtgccttaaattgtctctctccaaatggacaatggcttaaaaagaattctgcaaattggatccaagacaatatggagtctgcatacagcagctcatgcttttactcagaatggtgggtgctgaccagctctaacagggagtcagccaaagaaattcagaattgccaggaagcctatctgaaatttgactgagtgttcactttcacgagggaccaccttcaccctgggcctgttgcaccttgacatctgatggcgtggagttgtcactgttaggaagacatttaccatccagaacatgtgctattgaagtcacgtgatagcccaatatgtcaccaaatttcactagacaataggcttagaaacctttttgaggtttctatatgagagctaaagatgaaaatctacctgcagttggggaaatgatattctcgctggcatggtggagatgaccaaattaatacccggaggacaaggtagtcagtgtgtgtcttttgttagcaaatggatttgggagccgtctagaaaacattgctgaacagatgaagatgctccacgggaggttggttaaacatttggatgaaagtacagatgtttctaagctgatttagctcagaatattggctagattgtgcttccattgtgcttccgcaggaaattatccacagaactcctttgtttttgtttttgtttttttgtgaaccaccaaaggaaagatctacatgagaagaagtactctcaacaataaagagatttaacaatgttttatgggggaaaaaacgtggtctgtatgatggggtggcacctctctgatggggacagagtcaacgctttgagttagatttcacagatggtgtcactgtggctgccttgctcatagaaagctactggagaagagatgtcaaatccagaaagacaggactttcaacatatagtatactatttattttattttattatatgatgaggagagattcagaaaatctcttgtatcacacagcagttctctgttctctcatcacaaggaacataaaagacatactggacttgaagctgtttctctctcatttctcttgttttaattgttttttgagacttttttttttttttttttttttttggagacggagtctttctctgtcgcctaggctggagtgcagtgggacgatctcggctcactgcaacttctgcctcccaggttcaagtgattctcctgcctcagcctcctgagtagctgggaccacaggcacgtgccaccacgcttgtctaatttttgtatttttagtagagatggagttttgccatattggccaggctggtctcaaactcctgacttcaagcgatcctcctacctcagcctcccaaagtgctgggattataggcgtgagccaaagcacctggccctcttttttttttttttcttttgagatgaggtctcactctgtcacccaggctagagtgcagtggcatgatctcggctcactgcaacatctgcttcctgggttcaagtgattctcccacctcagtgtcctgagtagctgggactacaggtacgcaccaccatgaccaactaatttttgtatttttggtagagatggggttttgccatgttgcccaggctggtcttgaattcctgagctcaagcagtctgcccaccttggcctcccaaagtgctaggaatacagctgtgagccaccatgcccgaccccatttctcttttgcaaaaagactatattccccaaacttctttctcatactttaaaatttctatttattatatatcttatagcgtacatgatatattcgtacaatgttacatgcttataatttataaatatgcatatgttgcaggtgcctgcttacaagtttgtcacacataagggattagggtcatagcatttggacaccaccatgctatagaggatgaaagttaagaatttaaatagtcttcagataaaaggaagaaaagagggttaatgcactggtaatctttttcaggtgatgaatactgttcaaaacttagttattcaaatgtgttttcatgaaactgactatattataaagttcatgattttgcttattagagaatgacattgctactttcccaagtaagttaacagttccaaacatttttcttttggtggaactagttcttcaggtgctgaccaagtaagatggaggggtgttaggttttaaaaaactgtcctatgtttacttccacatttagagatacaagcttttgtgattcacgctcttcttaaacaaatacatagctcatgccaagcaagagagacattttatctgaagcttttttgtcttttaaaaccaaaccaaaacaaaacacaacaaaaagagtctcactctgtcgcccaggctggagtgcagtggcacaatcatggatcactggagcctcgacttcctgggctcaagccatcctgctatagtcccagctactcaggaggctgaggcaggaggatcgcttgagcctgggaagtcgaggctaattgtattttttgtagagacgggctttcgccatgttgcccaggctggtctctaactcctgggctcaagcagtccgcccgcctaggcctcccaaagcgctgggattataggcatgagccactgcacctggcctgaagctcttagactgtgtcctgaggtgcctgggtgtgttgccagctgctgcatttctgcctgtctgctttgcccagcatccaggctgcaagtgttgcaaagcagagtgtggctttgtcatctgagaacattctctggaaactcagctggtgtcattctaactggaaaaggtttgggggttgttttcaattaaatttatttaattgaccaaaaaaatggtatatatttatcctgtacaacatgatgctttgaaatatatatacattgtggaatggctaaatcaagctaaataatatatgtgtaaccacacaaatttatcatttatttgtggtgagaccattgaaaatctactctcttagcaatttacaagaataaatacactgttattaactatagtcaccacattgttcaatcatgtcttaaatttttttcctcctgtttaactgaaattttgtatcttttgaccaatatctcttctgcccactttccctcatccccttcagcctctggtaaccatcattctactctctacttctgtgacctacactttttagattccatgtataagtgagattgtacactatttgtctttctgtgcctggcttatttcacttagcataatgtcctctaggttcatccatattgtcaaaaatgacagaatttctgtctttttaaaggttgaatagtattccattatatataggtaccacacactttctttattcattcatccgttgatggacacaatagccatttcctggctattgtaaataatgctgcattgaacatggggtgggggtgcatatgtgtcttcaacatactgatttcatctcctttgaatatagacccagaagtggaattgctggatcacatggtagttctacttttaattttttgaggatccatactgatttccataatggttgtactaatttacattcccaccgacagtgtgcaaaggttctttcttctccacatcctctccaacatgtggtatcttccatctttatgataaaagctgttcttacagatgtgaggcagtatctcattgtagctttaatttgcatttcccttatgattggtgatgttgagcatacctattggccatttctttttttttttttgagagggagtctcgctatgtcaccaggctggagtgcagtggcgtgatctcggctcactgcaacctctgcttactgcaacctctgcctcctggattcaagcaattctcctgcctcagtctcctgagtagctgggactacaggtgcacaccaccatgcccagctaatttttgtatttttagtagagacggggtttcaccatgttggccaggatggtctcaatctcttgaccttgtgatctgcctgcctcggcctcccaaagtgctgggattacaggtgtgagccaccgcgcccggcccctattggccatttctatgtcttcttttgagaaatgtcttcagatcctatgtgcactttttaattgggttgttttctggctattgagttgtttgcattcttttttttttttttttttttttttttttgagatggagtcttgctctgtcacccaggctggcgtgatctcagctcactgcaagctccgcctcctgggttcacgctattctccagtctcagcctcccaagtagctgggactacaggcacctgccacctcacctggctaattttttgtatttttagtagagacagggtttcaccgtgttagccaggatggtctcaatctcctgacctcgtgatctgcccaccttggcctcccaaagtgctgggattacaggcataagccaccacgcccagctgcattctttatatgttctttgtcagatgtatggtttacaaatattttatcccattccatagatctctttactctgtcgattatttcctttgttgtgcagagcttttgaatttgatgtaattacatttgtctatttgtgcttttgttgcctgtgctttgggagtcatgtccaaaaaatcattgtccagaccaatgtaatgaagccttttctgtaggttgtcttctagtagatttatagttttggatcttgtttgtttgtttatttatttattttttgagatgaagtctcactctgtcacccaagctggagtgcagtggtgtgatctcagctcaccgtgacctccacctcctgggttcaagcgattcttgtgcctcagcctctcaagtagctgggactacaggtgtgcaccaccatgcccagcaaatttttgtatttttagtagagacggggtttcactatgttggccaggctggtctcaaactcctgaccctgtggtctgcccgcatcggcctcccaaagtgctgggattataggcgtgagccaccgcaccaggcctgtcttcttcttttttttttttttttgagatggagtctcgctctgtcaccaggctggagtgcagtggcgcgatcttggctcactgcaacctccgcctcccagcttcaagcgattctcctgcctcagcctcctgagtagctgggattacagacgcctgcctgccaccacacgtggctaatttttgtcacgtggctaatttttgtatgtttagtagagatggggtttcaccaagttggccaggatggtcttgatctcttgacctcgtgatctgcccacctctaccacccaaagtgctgggattacaggcgtgagccaccatgcccggcctgggcctaagtctttttttctttttgagatggagtttcattcttgttgtccaggctggagtgcaatggcgagatctccattcatcgcaacctccgtctcccaggttcaagcgattctcctgccttagcctcccaagtagctgtgattataggcatgcgccaccatgcccaggtaattttgtatttttagtagagatggggtttctccatgttggtcaggctgatcttgaactcccaacctcaggtgatccacctgccttggcctcccaaagtgctgggattacaggcatgagccactgtggcccgggcctaagtctttaactcattttgagttgactttgcagatggtgtgagacagggtctgatttcattctctgtggatgtccagttttccaacaccatttatttaagaggatctcctttccccattctgtgttcttggcagctttgtcaaaaagtaattgaccgtaagtgcatggattcatttttggactctcttttctattccattggtctatgtgtctctgtttttatgccagtatcatgctgttttggtttctatagctttgtgatgtgttttgaagtcaggtggtgtgatgcatcaactttgattttattgttcaaaatgactttggctattcagggtcttttgtggttccatacaaatgttaggatttttttttttttctgtttctgtgaaaaacgtcattggaattttgacagggattccattgaatccgtagattgcttagtatagtatggacattttaatcatattaattcttccaatctgtgaacatggaatcttttcatttacttgtgtcttcttcaatttctttcatcagtgtcttatagttttcagtgtacagatctttcacttccttggttacatttattcctaagcatttgatttttttatggctattgtaagtggcattgctttcttgatttcatttttgaatagtttgttgttagtgtatgaaaacactattgatttttgtatattgattttgcattctgcaactttactaaattcatttagtagttcaaacagttttttggtagtctttagggttttctatatataagatcgtgtatctacaaacagggacaattgaacttcctttccaattttgatcccttttatttatttatttatttacttatttatttagtttaacaatttcccaaatatttttatttttattttttcttcaacttttattttaagttctggggtacatgtttaggatgtgcaggtttgttacataagtaaacatgtgccatggtggtttgctgcacagatcaacccatcacctaggcattaatcccagcgttccttagctattcttcctgagggtgcctttgatttctttctcttgcctaagtgctctggctaggacgtgcagtactatgttgaatagaagtagtaagagtgggcttctttgtcttattcctgaacaagttgtctatggggattaattcactctagttagaaacacctgcttgcctagagtgtggattctcagaccagttgtgagttttatgatgtctgtttcacatttaatgcttaaatcatagggcatacctagtctgagaatccatactctaggcgagtggctgtttttaactggagtgaattaatccctacagacaactcaactgctcagtaatttctgcacatggctaatttaattgtactgtatgcattgtcccggttattaattttatcaaccaattatttacaccccgtgtataattttgaagcccaatctagtgaactaaaaagtaaaatgttatctcttaattgtcatctcttcccttctcttttggtttcctctttttaaaaccacgaagttcgtattttaagatagagagcctgtaagggcatttattaactatttgttggttgattaattaattaatccatgtttttatttcacccatttccagacaggattgcaccttcctcagcttaggtgcagctgtttatcttctttgagctatgttatgaattgttatggctttcatttgggtggtggtagtggggagcagtgtgtacatgtgtgtttgtgtgtgtgtgtgtgtgcactgttttttgtttatttttatttttatttttttgagagacagagtctcactctgtcacccaggctggagtgcaatggcacgatcttggctcactgcagcctccacctcccggattcaagtgattctccttcctcagccacctgagtagctgggactacaggcgtgtgccaccatgattggctatttttgtatttttactagagacagggtttcgccacgttggccaggctggtctcgaactcctgacctcaggtgatccacccgcctcggcctcccaaagtggtgggattacaggtatgagccactgcacccagccgtgtgctgttttaaaataaagcaaacaagcaagatctatgttctatgcagtggttcaataaaataagttattctttccagctcattttcttggtttctctgttcgtgtttttgagtagtcttactgcacagataaaagaactgaggccctgcagggggcagtgatctactcagggtcacctggccctttactggcagcgatagtaacacaaagtaggtgacctgactctgcgcccagggctctccccacactgcaacctgcctgcaggccttcctggggtgagacttgatgttgcaatttactggactgccaaacatttccagcattctctcagccaagcgctggtttaaaaattaatgactgcttaatgggcatttctatttctgagagttgagctgtgctttttcttttctcctctggtagaaatctgacatccaggacagcctctgctacaagacccggctctaccagatagaaaagtacagggcccccaaggagtcctatgaggtgagtgacccctgaagcaaacctcagggtctcttaggaagggtggatttccatttgcagtaattggaaaagaaaccaattactgtgggacactgaagtagcaaaagacacatacttacgctcataactgagcccttgagaaatggtttacagcggaaccagctttgcggtgtctaaaccatggttctcagctgtggctgcatgttaaagtcacggggagcgtttaaacatctggatgcccaggccgcacctgggacccattccattgaatcttgggaggtgagactcgggtatcaggagtttttaaagctccctggatgttccaatgagcagccaaagttgaaaaccactgtcaggatctcccaaaatgaaaatgagatgtttcagtgtttcactcatatgtgagtgaaactagcaaaaattgatctcatagaagtacagagtaaaactgtggttattagaggcttggaatggcagggggaagggagggtagagagaggttgcttaacgaacatgaaattacggctagacagaaggaataagttccggtgttctgtggcactgtagggtgactatagttaacagtaacttattatgtatattcaaaaagctaaaagagaattttgaatgttcccaataaaaagaaatgataaatatttgaggtaataaatatgctgatcaccctgatttgatcattacatattgaatacatagatggaaatatcattctctgtcccataaaaaagatgtataatgattatgcgtcaactaaaaataaaaggaaaaaaatgcaaatgctagaaaaaaatgagatgcttaaaaatagagctgagtgtaacacgtggcatcagaagaaagtgagatgaggaacgcaaaagtttgggatcaggcaggctttcctggccagctgtccctggtgacctgatgtaacctgggacgtacctagagaaaaagaacacaactctgatttcagaataaaaactaggctcctgtagcaaacatcccacatccatgtttgttaggaaactgtgtctgtgaattccagatccagggagggggccaggagtggggtgcagcctcagggcccctcattcactttttgccaagtgagcttttctttctctcagtgattttcctgggaaccaccttcccttttccctctggagcctgtttatgtcccctgagtgtccttgccacaggaacctctctcctgggacacccaggtctattagtctgttctcacgctgctaatgaagacatacccgagactgggtactttataaaggaaagaggtttgatggactcacagtttcacatggctggggaggcctcacaatcatggcagaaggtaaatgaggagcaaagtcacgtcttacatggtggcaggcaagagagcttgtgtaggggaactccccttaataaaaccatcagatcttgtgagacttactaccatgagaacagtatgggggaaacctctctcatgattcagtgatctccacctgtccccgcccttgacacatggggattattacaattcaaggggagatttgggtggggacaaatcaagtcacccacccagaagttccttcatttgagaagggatcaaaaagggaccctttgtctatgccccagtgaggtcactgagcctggcctctcccctctttccttttccaacgtaaagttttcatcctgatcccatgagcggtgcacatcgctctggaagattcttctctgggcttgtcttgcacgcagggctgcagtggagcatggtggttactggggcccacactgggctcctaggcagccagtgaagcaggtgtccagagacactgatgacagggagtgcccagctgcaggactctgtgcgaatgtgatgggagctcaggagagggacttgcccccggcatagaggtgggcaatggcacaggtctccatttcagacagaccctggggcagagagagaggagaaactggcaaagacagggctggaggtggccggcagtgggcagccggcagggggcggggcagccagaaggcagtgatgctgcagtggggcccgtgggaacagaggaaaggtcacatgtgaaatggtcagcattgtctactgggcagctagttgtcctgaggatgttagaaagaacagcttcgtgaagtgccaaaggcagaagagaggttgcatggatttggggggtgggagaggggaagggaagtcagtgagcatctgcctctccgtcagtgacactgcagtgaagggagagaacatgacctcgatagaaggatgctcaaggccaggcaggaatggtgggccttagccttgaccccaggctggatgcccccttcctcaagacaggctgtggggctcggggaagatgaggatggagacaagccctttggaaggtgggctgtggccacagaagctaagccacaagcccaggtgtggctttcaggcttaaagccagagagccaggtggtggggacccagatgccccctgaactctagacccctctggccagttgcttactaaatgttaaccccctcttgcatgaatgaaggggtcttgaatctagcacgctctgaaccagactctccccccgccgccctccgccctccaccacagtagcagccccatcctccccagcagtgcaaggaagaaacccaagagtccttgactttgaccctccccttacccccagagccaacccatcaccacattctgccaatttgaccgctaaacccctccaacccctgcactctctctgtctccatccccacacctggtcccagccacatcacctctgtcctggacttctgctatgccctcctaaccgactctcttgcttccgggatggtggcccgccactctctcctgcctggccgtcagagcgagcttttcaccctcgcaccgcatcatgtcactttcctgcttgagaccttcggaggtttccttcatttgccaggcagactccgtgcatggtcgccctgtgtggttcagccccagcttgcttctcctgccttgtctcctagccacatggcccacacacacagcgctgcatccctccctgtgctcagtccacagccttcgggcttgctgtgctctctctgcctgtgggggctgtgcacatgctgctccctcttccagagtgttttccctgctcctctttgctgaacctaagtgtcttcagatcccagagcaagatcacctccccatgggcacctgctgttccctgacctctgccatccagtcttatcctatcgatcctatctgcctaccacgttctacatcctggggcctgtcccatttgcagctgtttatttgttttggggttgtttgattaacatctctccctctgggctgtgagttccagaagagtgggctctgagtcccttttgctcctcacaatattcccagaggccacacgatgcctggcatgtaggtgctcaataaatatttgctcaataaacaaatgaaaagatcaagtgggccctgatcagagtctcagaaaatggataggtctgggataagcaaccggaataggtagaacattccaggtgggatacctggctggattaaaggcagggggatacctgcagcctagcacacatatgacgttatcatcaccaaatggccgtgccttacggcagggagggacctcttatggtcacctgcactgagggtggtcaccccagccagagtccaggggatgcagaattcactgttagacttcctgcctcgtgctttgcatgtcactcatgaggacctcaaataacaatgcaaacttaggtgcatggagagcccaatgtgtgtaccctaggtggcccctaagccaacttgccgatgccctggtccacgctgacctgacacctgccccactgcgagtgtgtgtcggaaggggccagaactatagtgggaaaggggcccttctttcatctcgattccttttctgtgttatttcctctgtcctgaagacacatggtgagcgttttaaacatttgttgaaatatttaatggttaggatttaaataggaaccctaatgggcaaacagcattcaattttctatgatccatttgtttcctctaaactgcagtgatacttctctaattaaatgacagctattaccagatgatccaacttgtctcccgaggaacctagaaagtggagtggggctagttcaggaaagggaagggcccaggcctcacagggaaagtccattcggagccagaggaccttccagtcgtcctccgcaccacatggcagggggtggagctggatggggagagggagtggtggagaggtttcagattgtgagcaaaccagggtgtggcccagggctcgtgtcccctagggctgtcatcaacccgtgtcccgggcactgagtgcaagcagtggcctctttgttccttttgattccagttcgttttctcctaggagacaaaggagctgaattaagttgcaaaaacttccctcttggggtaaccgtgcagtgattttacaactttaccattttctctacctctttttcctgtcaaaggcagagactgtatctataaaagtggggtgcatttctcatctgaggaggacacctatcgtgtgtgcccgacggactcctttttctgaaaaagagaaccccccaggactttgggggtcgaggtggggaggttatcattttaaattggcttatcaaagccattagagagcccagggccagttttattaaagtcttttgaaaaataatgttaatttataggaaaatgtcaaatccagctaggaggtctcctctgcaatgacaaagtaatgttggcgttttggaagaaaactgacggagagggtggcagggaactggattcgtctgcttggctgctctaacaagcaccacaaaatgggtagaaatttaacttttcacagttctggaggccaggttcagggcttacggatgcatcactatgatctctgccttcatcttcacacagtgttctcctgtgtgtgtatctgtgtcccaatttccctgttcttttctctcctccctccctcatttttctctcttttctctcttttctttctttctctttcttttctttttctttttgctttattcttttctttttctttctttcttcctctctttcttctttcttccctttttccttccctccctccctcctttctctctctctctttttctgccttccctctcctctcccctcgcttcctcctcctctcccctcccctcccctccttcctttttctttctcggtttccagaccaagctggagtgcagtgacacaatcatatttcatttcagccttgacctccctggctcaggtgatcctcccacctcagcctctctagtagctgggactacaggcatgcaccattatgcctggctaattttttgtagagagggggtttcaacatgttgcccggctggtcttgaactcctgagcttaaggcatttgctcatctcagactcccaaggggctgggattacagatgtgagtcaccatgcctggcccaaatttccacatttttaaaggacaccagtcatactgcattagggctcaacctaatagcctcatttaaacttgattacctctgtaaagattctctctccaaataaggtgaaattctgaggtcctggggttagactttaacctatgaattttaggagaatacagttcaacccacacagggatgaaacatttaaaggcaaatattaaaatattcactttgtgtcttatttcaaaatctatataactttaaaaaatatagttcagaatcagatccagcaatctgtgctattagaaatcagaagtgtagttacttggccgggctcagtgctcatgcctgtaatcccagaactttgggaggccaagatgggtggatcacttgaggtcaggagttcaaggccagcctggccaacatggtgaaaccccgtctctactaaaaatgcaaaaattagctgggtgtggtggtgcacgcctgtaatcccagctactcaggtggctgaggcaggagaatcgcttgaacctgggaagcagaggttgcagtgagccaaggtcgtgctactgcactctaacctgtgtgacagagcgagactcggtctcaaaaaaaaaaaaaaaaaaaagcctggttactttgggggacagaatgcctggcagaggacatggggatggcagggaggaccttccagatgctggctgtgttctgttttttgatccaagtgccatttctgtgggtgtctttgctgtttgagaaaacattgagctgctgacttatcattagagcactcctccatacggcatcttagattttaataaaaagtttacctagaaaatctattcagcacacgagttaggacatctgctgtctacttccatggcaatttcaggatttgctttctgtctatgaaaaccgaaacgaataattctcaaccagagctgcagggccgtaggggaagcatttagggaataaatagcaggtgcagattctcgaattgttgaaggatgttccttttcacaggcctctctggacacctggacacgagatcttgaattccatgccgtgcaggtaagaacttgggggattattatgttagtcagggttctccagagaaacagaaccaatagagtatggagagagagagagattgagactgagatttattttaaggagttggctcacacagttttgtgggggttggctggaagtctgaaatctgcagggcagaccagcaggttggttgaattgatgttgcagcttcaagtctgaaggccatctagaggcagaatttcttttgccagaagacctcattctttttttttttttaaagccgttgactgattggatgagacccacccacattatggaggataatctacttgaagtctactaatttaaatgttaatcactttatttatttatttatttatttatttatttatttatttattgagtctcgctctgtcgcccaggctggagtgcaatgttgtgatcttggctcactgcaacctccacctgccaggttcaagcaattctccggcctcagcctcccgagtagctgggattacaggtgcccgccatcacgcctggctagcttttgtatttttagtagagatagagtttcaccatgttgaccaggctgatcttgaactcctgacctcaagccatccacctgcctcagcctcccaaagtgctaggattataggtgtgagccactgtgcctggcctgttaatcacatctttaaaaccaccttcacagaaccatctagactggtgtttggccaaacaactgggtaccatggcctaggcaagttgacatatgaaattaaccatcacatatgatcctaagggttggtcagtctctgcccagggcagcaggctctgccagccccatccttatccagaattaaaacatgcagaatcctgttgtgagtgagtttatcagaatccctttagatcacattggttcttgctatgcggaattggctgttttttattgtcttgttacaactctacacctgcctgtgcatttctgttaccacctgtatgagaaatggagtttgcagctatctagagcttcctggctcaatggcctaatttatgaacaaaaccccaccttttttttttgaggtggagtcttgctgtgtcacccaggctggagtgcagtgggtgtgatcttggctaactataaactctgccttccaagctcaaatgattctcctgtctcaacctctcaagtacctgggactacagacgctctccaccatgccaggctaatttttgtatttttagtagagacaggatttcaccatcttggccaggctggtctcaaactcctgacctcaagtgatctgcctgcctcggcctcccaaagtgctgggattacaagcatgagccactgcgcccggcccaaagccctctttttatccactcacttgtaggtttttctgcagcaaaaccaggtttcttcttatgtgatgggtgacaaggaaccaaaaccaaccagccaacgacatctgggccctgggccatcccaggtggcagcagtcagcacttggttctgacagaccaaacagcctggtgaggcttattaatcatcagagggaaggaaagctccagaaaagcccatgtcgaactggacttgatagagttactcaaagaaaacttacctcagctcccagggctcctctgccacatgtggaaacaggcagatttcccaggcagccatccatcctccggcctggggtgatgaggatgcaaagcaagcatccgtccctgttaaatggatgcatttgctgttcaggcgataaagcaagtgtgatgtgtgttcattgttatcctcccagagctgggaaggatccacacttttggttacacgtgggaaaacacctccctcgaggagaagtgaattgcccaaggttacccaacacattatggagagagcgaggaatggactccagacttccggactgccgagctgtgaccatggctgggatcctcaggtggagcacctgtggcagccatgccgggaaagaagggggcgctatgggtctttggaacacagaagcctggggtcattcttcattggccatcatacccccagttgcacagccatcagggaagactctgaagggaaccagctctctggagctcagacctcagaggctaaggatgggtttccccctcctgtaggcatctccgtctcctccacaggacaatatacaacattaaggatcctgggtaaatgattgttcatggggctgcgttttcaaaatgtcccactttgcaaatgtccgtgcacatccgcagtgggtggaaatagttgatagagaacaagaaggtgtttagtgtatggcttgcctctggggcctcatgtggtcttttctctgatctgccttgggggatttggaactgtgccatgaaggtgcgagagggcgggcttcgaaccgagagcttgaattccatcgcccaccctcaagtctatgtgggtgctggagcgcatcggagggaagccaggagtctctgcaggcggcagccttgccgtgtgaggagcttgcatgtggaagggggaggtgatagtccctctgaagatctgtttctgttatgtaaggcaatttagcatcctgctccctaggaaatttcttttggagaaaacaggccatgcaaatgaaaaagtctaattgggtgattggctgcatttggtaacatgtgcttggagggcagggagattggctagttgtaaataaacatgctttctctgggcggttgacccttctgcgtggactgactctgaggtttgtccccgacagggagcaggtggggtgaatttcttgatttctccttagacaccagttactatgaaatcactgattcttttcagctggagaaggatatgctaggggttcttggaggacataccagggtgcaggatgttgggatgaagtttaataagggtggtcttggcagggtttcctggaattttctgtctgggggtgcatttttccttttttctgcccccatagcagctttctgctcattgccaaatagcccccttgtcagtgacgggagaaatttggtcttacaggccaaccttggtctctttgcacagcaaacccccacgcattacacaccactaggtacccatagaccctaactgggtggcgatactggtccgcagaagttttgcatcttgattgttaagcttttgagaacccaaggagggttagaaaggaatgaaaataaacctagacagccaccggcagctctcaaggctgtgggccacagagcagcctgaaaaaaatgtttgctgatcgatttaaaaagcaatcctaaaacagaaggaactgccgtgttgtcttttctaccaaatattgtttggaaatgtatgacaaaggtgcatttgattactttttcctgtagaaggtgttagcaggtagagctggtgactttagcataaaagtagagaaagggaaccaagtaaaaggagattgtgccagatttttcaggaaagccggtaacattgcctttgctgctggatgggtgtgtgtctctgtgtgtgtaagcgtgtgtgcaaaagcttgttctcctttgccttggagaaggtggcctgttggtgtgtcatgcacacaaagggagaggaaagccgtggaaaatagtgattgtcctttgctggcttcaaccaaggtgacctggaggacacgttccccttcatggcatcccagataacgtcctggagcacataaccttctctggaacattcagatcccactgcaggagcctaggactgtggcatgctcctgcctctgggcctttccatctctggaaccgcctgaccctgctgcaggctctgagagtgtggtgtcaagtcaagggttgacaacatcaacttcagggccgggaaaatccgcgtttccaccgggctcatgggtggatgacataagcactgcaggctgtttcttcacatgtaaaggaggtagcagaatttgccttgtggtgggtcatgccctcagtgcagtgtctggcaccctgcatattctcaaaaaaggctggtggcagctgtgaaggtgctgaggagggagtttgaggaagctttgcctctcctgtcttcccatgtcacccctttgttagggaggagccacatcagctacaggccagggccctagagagctgtagcccctcacagtggcacttgccacgaggctcagcatccccacttcccacatctaccctgtcgtctttcccactcaaaaactggacatcatgaactcttatctgcagactttgaacatccttattagaaagggctgcaaaagtgtagagagatatttccctgagaagcttctcaacaacatgaatgaaaaaatagacgagctctcttggtttgcaaatgctcttaaagttgagggcaaaaatgtgaaaaagaagagtctttttttcctcctcacccacggtgaggtcagaggtggagttgctttaatagtaaacaccaaacacaggctttagggctggaaaaagaactgctgctgcttcttagtgacatcacccttcccagaagcttgaactgagttaattttagttcagttcagtttctaccagcccttttaaaaaacattttaataactatttattaagctttctgtaagcatctggctttatgccagaggctgtggacttgaagatacataaaatagtcaaattcattcctatcagatggattatattctagtacaacgaaggcaagatttaaaccaaaagaatggccactgccaagcgttttggctcacatctatagtcccagcattttgggaagcagagacaggagggttgcttgaggcaggagttcaaaaccagcctggataacataacgagaccccatctctacaagaaatctttttttaaaaaatagctgggcatggtgatgcacacctgtagtcccagctactcaggaggctgaggtgggaggatcacttgagcccaggagctcgaggttgcagtgagatatgatgacaccactgcaccccagcctgggtgatagcacaagaccctgcctcaaaaaaaaaaaaaaaaaaaaaaagcttcatacacacgttcatacacacgagtactaagtacgcaagtaagtgctcacacgattagggtagaaagggctggaagcccatcaggaccgctcagggctctctggatttgttgtatatgttgtgttggcacctccttggcttgactgccccaaatagaacctgatgtgaaggtggaagcagttatgtttccagttgcctttgcaaagccgttattgcaggcacaatctttaaatgtagacagtgggtttccagaagtcctgctctgcttcaccttggtttgttgggcttgttccagaagaattgacctcctaggaatgccctgcccttgctggaatgccttggaagagcacagtgaaagggaactggggtccattgaaggcctctcgctgcccaggcagagggagatgggcttcctggagcattggctgggccacagctcctccctcattcaacacacagttgagagcatagagtattgaaaaggtggagtttctctaatcagtttggatgacttttcaaagaggaatcccattgtgtcttctagtatgtgtctaagtgcatatgtttgcttctgatttgtaggataaaaagcccaaagaacaagaaaaaagaggggattttcttcatcgaccattctccaagaagttggacaagaacctgccctcgcacaaacagccctcaggctcgcttatgacacagattcagaacaccaaagccctcctgaaggaccggaaggcctccaagtccagcttccccgacaaaggtgggtcagctctggggactctctcaggccactcgtgttgggctgtgtgtccgctgtgtagccctcacaggggatggtcgaatgggccctagagcagagatgattcctgtgcccacagaaaagcaggattaatggacctgaggttgcctgagcacagtccaggaccaagctgtgtggcattagccatctgtgcaggaagaatttgagaaaacagagatggggtgcaaagtattacggaaacagaaattggggtggatgatattgtcagaacagaggttgggaggcacagtattgcaggagcagagatcagggtgtgtggtactgcaggggcagagatgaggctgtaaggaattgtgggagtagagatggggtgcagagcagagaccgggtatctccctgagttcaaatcccagctctactgcctgcagaggtccaagttcctttagtgctgaggatcttcactggattatttgtaaggcctcccacctgttggagctgttgggtagatgagatgagatgcatatataagctccctcacctgagtcagaatccagcccatcacagataactgacaaatatgtttccctcctctgggacgagtgctaaaagatgcaaaaggcagaccttactgggcacaggcttaacacatggtagaaacgccaagaggggacacaggagctgagggcgtcctgaagcagagccatgaagtagaggagaggttcttattactgagggggatgagacacttcttggagttcaatctcctaaaatatgaaagaccaggttcagagagggccgtggctgtctgagatacactcaggtgtagcgggcagttagtccctgagcgggacttgaacctgcctcctgtccttctatctcccatgctgctcccggagagaagccactgtacccactttgcccaaagcaacctgctttccctggggcagagcatgcagtggatcggggaggggcagcagtgtccatgtggcagctggaacactggagaccttggccattaatgaagttttacttctttctgctgatgcatctcaggtgcctgcgccggcctttcatttcggtgcctgtgtgtttatttctgcaaggcagggaggcttcccagtgccctcagccactcccaaaatcgatcccagtgggcaggagcttgctcctgcagctgggcctccacagagcctataaaacgttatgggagaagaaagaagctaagacagagcttattccgcatgaacttggctttatttccctcatccccaaatctgtagggggtttcccctttcttttctggcccagtttccaaacctggattctagtctatgccaaccagagacagaaaccatggggatctggcaggttgccttaactgtatggatggatgatattcttcccccgttcagaattggatgaggttccatccagatcaaaagtcacgagggagccttaaaagggaaggaaatcctggcacatgctccaacacagatgaacctggaggacattatgctaagtgaattacgccagtccctaaaggcggatactgtgtgattccacttatatgaggtccctagagtggttagattcatagagacaggcagtaaaatggtggttgctgggggtttcagagaatggggatgtatatggggtgttagatttgcaacaggaagacagttctggagattgattctacaacagtgtgaatatacttattattgctgaactgtacacttaaaaatggttaagatgataacatttctgctacgtgttttttaccacaataaataaattttttaaatgtcacaagggaaacatgtcttccactgtgggctgtccaaggaccagattggcaggaattcagtcaagggaccttggtgtgcttctgggagttttatggatgtgctgttgagtgcatgtaccttttttattccaagatcctttggcaaggtccagaatttttttttcttttttttctttttttgagacagagtctcactctgtcacccaggctgcagtgcagtagtgccatcacggctcactgcagcctccacttcccaggctcaggtgatcctcccacctcagcctcccaagtagttaggaccacaggtgcatgccaccacaccctgctaattttttaaaatttttttagagacggggtcttgccatattgctcacgctggtcttgaattcctgggctcaagcagtcctcccaccttggcctcccaaagtgctgggatcacaggcgtgagccaccgctgcctagggtccagaattttaagcaaccaaaagcagggacgatgttaggctggggccatgaggcaaattggaatccaggagacgtcctgtcgccagccctctgtccctccatcctaggaagactgcccgacctctgtggggagagtgacatgctgctggtgacttttgcaaagtagccaaggctgtttgccggttggtttcttctgaccttggcgggaactgtctcagttaagctggaggtcacagcaggcaggagaagggccgtgagcactgtccggacgtcctcatgattgtttatgctttcttggtgtgcagattcctttggctgccgcaatattttccgcaaaacctcagattccaattgtgtggcttcttcttccatggagttcatccccgtgccaccgcccaggaccccgaggattgtgaagaaaccggagccccatcagccagggcccggaagcactggcatcccccacaaggaagaccccctgatgctggacatggtgcgctccttcgagtctgtggatcgcgacgaccacgtagaagtgctgtctccctctcatcactacaggattctgaactccccggtcagcttggctcgcagaaattccagcgagaggacgctgtccccgggtctgccatccggaagcatgtcgcctctccatactcctttgcatccaactctggtctcttttgctcacgaagataagaacagccccccaaaagaggagggcctgtgttgcccacctccggttcccagcaatggccccatgcagcctctggggagccccaattgtgtgaaaagccgaggccggttccctatgatgggcatcggacagatgttaaggaagcgccatcagagtctgcagccatctgcagataggcccctggaggccagcctgcccccactgcagcccctagcccctgtgaaccttgcctttgacatggccgatggggtcaagacccagtgctaacttgggccagcggggtttggggtatctctagaaaacagcaactgaacagagctccacacatctgtcagggtgtgagcactccaaggcctcgcgtggagcatccttagtcccacctgtagctgaatccacagacccaaagcctgcacaacccaacctcgcttagggacccccagagatgctggaatcgctaggagggttggctccaggggcagccaattcctatcattcagatcttccttcctcccaagtactcaccaaccccttccacttcccacttcccccaggcttggggggaaaacagggcatgagccttctggggcactcagattatggactgttaccagatctttcttcacgctgtgctacatgtgtgcctctcacagcagttggccacagttacagggagagaacaatatcacagtcattcatccaggccacgtttcctctgcggagtgtagcagccctgcctttcatagcagggattacctgaaggccagcaggagccgggggcaggcccaggatcctcagaggaagatggagaggagcttcggaccaagatcaaaccaaacagtggggaccccaacagaagagaaagactgaaggagacactcatttcccaagcaagattttgatagatttttgttgttgttgttgttgaaacatgctaatgattgaattatcttttccaaagattttttttaaatgtgatgtcggtaaattgaaataacataattttttaaaacttggatggagagatgagaagcaattccaccaaactcatgttttcacaggagggttcagtgtggagagcaaaaaagctgactgtggtgatttgctgagtgctgtggcccacaggcagggcaagtctcggtggccctgtgttcatcctgttgtttaaggcatagccctgatccttctggaaggcatagaacacggttacagctggttctgtagaaagagggaaaagatgattgtgacaattcagagcataactcagatggcgagaaggcagcattatctctgtgcgatgctgatttcaagctgcccacagaactggtgcggctcagagctcggcgagtttgctgggagctgggagcaggcttgcctggcagagaacctgttcagatacaggccagtttcttcttcgaggaaagccaagctcctcaaacagggttcagtccacgttgtgttttcacacctttctccaaggatcgaaccaaagatgtgtctccagtattgtgtctgtgcccctgtgtgtgttttgtggacagccgtgttgtctgactgtatccagctggcacttgacagggtgcagtcattggtgagaagaatcagaaaaagaagacccatcagcacaggttggataggggttagtgtaggagaccagttacagaatggcctggagtcttcaacttttgaccggtgcaggtgtgaccagagaccacctctgtggccacctcagatagtcatctcagtccaaggatcccaaaacacaaatctagaattgcaaagccagcctttatttccctggcaggcagccttgccagaaggcagagaggcagttctgaatcattctctcattcaccagtggtgacatccttcagtccctcacatctctgacagagcgggacagaatggatatttggctgaccttggtgagacctggagctgcctgtttcttccctaggggatcaccacggctctagggcattctaggatgaggtcagaccccttggccattggtgttattttttgtatagcttcagactgggttccagaacttaccattgaaaacagagcttttaggccaggtgtggtggctcacacctgtaatcccagcactttgggaggccgaggcaggtggatcgcttgagctcaggagttcgagagcagcctgggcaacatggtgaaagcccgtctctaccgaaaaatacaaaaaaaaatagctgggtgtggtggtacgtgcctgtagtcccagctacttcggggactgaggtgggaggatcacttgaacctaggaggtcgaggctgcagtgagccaagatcatgctactgcactccagcttaggtggcaaagtgagaccctgtctccaaaaaaagaaaatagagctttataagcagagagaagaaaataatcatctaagaccatctctccattcgacatgaagtgtaccttttctaaagacggtttccagctgcaacggctccactttgcaggcttgcagggtgtatacctgcgcattgggaacttgctggaacccctgatgcattttccttgagagcaggggtacttccgccttgccgttagcttgtggagaacgtgcttcttattcctggcaggcttcaagaacagctgcacatgtgccgctaactgaccgcgttgccattggcgacctggactctgaactcaggtttattctaaacccagtgagaggtgagggggagtgatgaaaggggatcagctgtatttgtgtgtgtgtgtgtgtgtgagcacctgacaaatctatgaaaccgagtgaaaggagaaatgttagattctttattattttattatatttatatggaaagctcgactctccctttggtaagtccgaagcatgttgtctgttcgaccgtgactgtcttcctcagtctgtgcctgtgattccagtcaccctgtagttactgacagaaattgactggactgtcattgtgtgaagtctaggaggaaatgtccattttaattgtatgatttggtcataagtaaggactatatttatgtcaccattattagatatatgtacttttgtaatgactgtgaaatacacttttccctcactacgactgcttctttatttgctgataaatcttaaaacaactaagtacgttgcaaataatagtacaggtaccatcttttatgtgaagttctttttctttttttgagacagggtcttgctctgtcacccaggctggagtgcagtggcacaatcacagttcactgcagcctcaacctctccagattcaagtgatcctcccatctcagcctcccaagtagctgggactacagttgtgcaccacaatgcctagctaattttttttgtattttgtagaaatggggtttcgccatgttgctcaggctgatctcaaactcctgggctccaacgatctgcccaccttggcctcccaaagtgctgagattacaggcgtgagccactgtgcctggccttatgtaaagctcttgacctagcatctgactggaaacaagcgggaattgcattggggggcattttctgggccagtttccctgccttattttacctgcaataggtgtgcctacaaaagtctttctgacatacacactgcaggtggcagttcaagaagaatcaacctttttcatttggggatattaggatcttccttggagactctgaaaatggcacacaaagaatggcagttatgaacgtgacttctagattttgtccttgtaggaggccttggtcatggataggggaagagggatgatgggatggaatgggagggtgggatctagatgacctcttgaaattgtcccagttactgcttccttcataactgttcacaaaacgtttttcatatataccaccttgtttcccctgggaagtgaggggacgaagccttagagggtgacatagctagaaagtggagaagctcactgttcactgtgcaaagccccagtagtcggattccggggaaaagaacaagtatctagttttgatgacaatgttttcttgtaagaatcccaacactttagaatagaaaaggacctaagattctctggctcagccccagcctttctgaagaagggaaaactagggacccagatggtttaaggacaccccagagtccccagatgagctggcatttgagctggtctggagcagagtttctccctcaaagaacacagagaaatcagagagtggctgccatggtcagagggggatgtcaacaacagatcaagccgtcatcacaacaggtatttctgaagttcctgcagggactaggtcttgcatttttaagtccttttcaaaactgtgcagcttcctgaaccttatgctgtttgtcccatccactcttgaagctggggaaagacagctttctttgggaactctgtctttctcagttgacttcccaagtaagcagcaaacccctggatagccttgttatctactttaggtattaagaggctattgggttttactagattaaatcaataaaacatttcctatagagccatatcatacactgaagcaaattcagaaagaatgcaaaactgctatcttttgggggagtctggaagcctgttggttagtgtatttattttctttgtggggtcttctgtgagctacaggcacagtaagaataattcagagcggtactgggagttggttcaatttcatgtcatcacttttcaatgaagggagtgcatttcctgagtagtaaatgagtatattatttgtggcagcttttctgttaagggagctttccagacatctggttgcaaagacaaataggatatatatttgtacttcttctctgtggacatgtttttgtgacacacagttatctctaggagttgacgtctgtgggcactaagggactgaggttgggggagaaagctgaggaggctttggaagagaaggtgaggagcatttcaggatttgcagtccccctccacatgtatccacatctgagctggtggtgttccaataatgaggcatttggggcaaccaattttggaaggatagaatagctttatgtggagcaaacttgaggatcaattggagttgagtggtttaaaacttaaagatggcacaggaagctgtatcatttacaggtgaaaaaaataaatgggtctgacttcagggcctcagctctttgtatttcctacttggaagatgggctattagcaattttgaaagcaaaggctttggtttacatttaaactctataattttttttaaaaatgtgttctttctagtcttgttaccatagccagctggaaagggcaaattgcaagcctatattgggaacaagtcttcttgccgaaagtagggcagtgaagttcttggcagatctgagatgagaatgccttcccctgactccttcatcagtgttcagtgctcacctcctctggcaaccagtatgctagaagattaggctttgctatgatcacaaattaattccaaatctctgtgacttgcccaataaaggtttatttcttaaaatatttttatgaggctgggctgaccacaaaacggctgtcttccatatggtgactcagggatccaggctacatccaacttgtggctgtgtcccctcaaaatgaaacgtctttggctgctccagcacaggaaggcacggctggagagttttccaccagcccttaaacattctatgaggggactcatcacttctcccacagcccattgactggaactggtcacactgccttgtctgtgagcaagaggctgggaaatacaggagcatagggctacttgggatgcagctaatgtttctcccatcttagggaaggtacagctgcctgccatttatttgttctttgtttttgtttttgcttttgttttgagatggagtctccctctgtcacccaggctggaatgcagtggcgcaatctcggttcactgcaacctccacctcctgggttcaagcgattcttgtgcctcagcctcctgagtagctgagactataggcacatgccaccatgcccagctaatgtttgtatttttagtagagacgagggtttcaccgtgttggccaggccggtcttggactcctgacctcaagtgatatgcccgccttggactcccaaagttccaggattacaggcatgagccaccgtgcctggccgagatgcctaccatttaaaggtaccccaaaactggactagccttttcccattgtcacacaattatagcacctcttagtaaagagttacttttttaaaataaaagaattagcattggtaaatgttaatatttaaggagagtgttttgggctgaattctttcctccacaaattcatatgttgaaaccctcagccccagtacctcagaatgtgactacttagagatagggcatttaaagaggtgagtaagttaaaatgaagcctttagggaggaacctaatcaaatctgacaagtgcccttataaaaatgtgaggtctgggctgggcgtggtggctcatgcctgtaatcccagcactttgagaggctgaggtgggcggatcatgaggtcaggtgtttgagaccagcctggccaacatagtggaaccccgtctctactaaaaatacaaaaaattagctgggcgtggtggcaggtgcctgtaatcccagctacttgggaggctgaggcaggagaatcgcttgaagctgggaggcagaggttgcagtgagccaagatcgcgccactggcactccagcctgggcgacagtgcgagactccatctcaaaaaaaacaaaaaaacaaaaacaaaaaaaaatgtgagatatggatacacaatgggacaccagacggaggaaagaccaggtgaggacacagagaaggcagcctcaggagtgaagcttcaagacgaaccagctctgctaaaaccttgatctcagacttccatcctccagaactgggaggatataaatgtctgttgcttagatcccggtgaggtatttcattacagtagcccaggccgactaacacggggaaaaggtcagatagtaaaatttacatcttctaggaatctcatatgttttgccccatatgccaaatttccatttatccttttctgactaaatcactcccagaaaatttctcttttttggagtgaaattccaccctctcctctcctctccttttcttttctttccttttcgaagcagagtctcactctgtcacccaggctggagtgcagtggcgcgatctcggctcactgcaacctctgcctcctgggttcaagcaattctgcttcaatctcctgagtagctggaactacaggcatccgccgccacacccagctaattttttgtattttagtagagacggggtttcaccatgttgcctaggctggtcttgaactcctgagctcaggcaatccgcctgccttggtctctcaaagtgctaggattacaggcgtgagcctctgtgcccagcctgaaattccaccttttctaagtgtttcttgtgctttaagctcagtgtgccaattattttcaagtttctttcttcctttaatccagaggtctgcaaactttttctgttaaggaccagaaaataaatattttaggcttaggagatgactgttgcatattagtctgttgcgtattactctgcattgtttttaagtttagtttagtttttgtttttgctataaccctttgaaaatatgaaaactgttcttatctggtggacctacaaaaacaggccatagcagattttggccctcaggtagttattttgctaacccctgatttaatcttcacaaaaactccgtgaagtgtcatattttctctattttatagattagttttgtgggttttatagattgtttttgtttttagtttttgtttgttttttgagacagagtctcactctgttacttatgctggagtacagtggtacaatcatggctcactgcagcctcgacctcctgggctcaagtgatcctctcacttcagcctcccaagtagttgggactacaggcacatgccaccatgctaggctaattttttaagttttttgtagagatggggtctcactatattgcccaggctggtttccaactcctgggctcaagcaatcctcctgcctcagcctcccaaattgctgggaatacaggcgtgagccatcatgcccagttgacacaatcaggacttctgcaatcacacaccacaactttcatgttaggaactcaccacttgaaagacagagagggctccttttgtgacatctgggccagtgggctctcagaagggcctgtggctaatggtaacaaatttgttaagagttttgcaaaatgattcaatctaagggaacttggaggtggggagagaccctggctcttttctttgccactccttccttcgttgctttttgtagatttccagggttggttgccagccacaggaatggcagtgctacaggagagccatcctggtctcgagtctgtcattactatttgttccccacctttagattcaatcctgtcttcatctgtgcagaatggaacatggccctagtccccaagctgttttccattcaagctgtttcccttttctcttttgtgaatagcctctcaaaaatgggctcttaattgcttataaaaagacagagcttactcaaagtctcaggaaacaagtctaaatctggagcagatgtgaagctggatgatgcttgtagacagatcattaccattactcacaactgggtgacgtgcgggccattgggatggacgagtgtccccgccagtgaaagatgaatcatgtcatctgagtcagagaatttcaaagagccattcagagtccttaccacccagagccccttgaattatctgagccattctcacgttcaaagcattaggccaactcagagaatcacaggaacaatggtggtcacccagccttgggcttagatctccagaagtttgaatgaagaaattttggattttcagattctcaggctaagcacaatgcaacttgttggagcatccttttcacaactcactgctacttttttttttttttttttgagacagagtatccctctgtcacccaggctggagtgcagtggcgcgatcttggctcactgcaacctccacttcccaggttcaagcgattcttgtgcctcagcctctcaagtagctgggactacaggtgtgcaccaccatgcccagctaatttttgtatttttagtagagatagggtttcaccatgttggccaggctcctgacctcaggtgatctgcccacagcctcccaaagtgttgggattataggtgtgagctaacccacccagcctcactactacttttaaaacaaaacaaaacaaaacaaagcatttttacctaaaactaatatattatgtatcccagatacaaaatcagttgaattttgtcagtacaatccttattgtcctctaagcattcagggaatcattttaataagcaggtgatgcaattgagaccagaatggagaaatgatgcattgaagaactcacaacttgtcagttacagcctctgccttcaagctcagttctcctcccaggaacctggacaaagaacccagaattaaaagaggatctggggtgcttggggtgtcatgatgtctgaggtctactcagtcccttttgcaaaattttgcacaacagaaagggtggacatggtgatggccatagtaggaagaaggaaattgatttgtgaggagtgtttgaatgaagagggtgtatgtgagtgctcttttcaccttcctaagcttggtttgtcttgccctcctctgagtactcctagcagcaatgattacgtgtaataattgttacattactgtttctcccagggctctgggacactgtcttacatatctttttaactatacccagtgatccaaccacgtggatgaatgagtagatgatggatggatggatggatggtgaatgggtgaatgggtagatgcatgtatagatggatgggtagatggtgaatagatgaatggcaggatggatagacaatgaatggatggatgggtaggtgaatggatagatggttagatggctggatggaaggatagatgagtagatgatagatggttggtgggatgaatgggtagatgatggatgaatgggtaggtgatgaatggatggatgggtgggcaaatgaatggatggatggatggatgaattgagttgataataaatgttaaggggagttagatgaaccagattagtggatttctgggagggcagttcaaggaaaggaaaatacttccttaatccacagtgtaaactctcaaatacacaataaacaaaaaaatagagggcctggaaaacaaatagagctctaactttgggtacaaatagcctttacagcattgcctcctcctaccatggatccactcactcaccaccctgaaagcaaggaatcacaaaccccggttgcacggtgaggccattgcccctgttgtcaaacgcatgtgtgtctatttgattgttttcttttggtgaccttacagggatttggcaaggagataaggtgactatcaaataagccagaacaggtaccctgccactctctccacccacacagctgtttatgaggccagtgtactgaggcccaaactgctctgtaaagtcaaagtaaatcctgactgaagtactgtgttagcctcactttcatgccttgtcagcccaagcttccagctgtgttgtgcaaaaccatctcaaagctatagttggttaattaggcattttcacaggagatgggtagctaatcaagatgatgttcacacagctatgtctcaccccagctaacctgctcacttctccactgctatgggctgaattatgccccccaaattcatgtggaagcctgtcccccagtacttcagaatgtgtctgcatttggagctagggcttttaaagaggtgattaagtgattaaggtgggccctaatccagtgtgactggtgtccttataagaaggggaaattgggacacacaaaaagacacaccagggattcaggcacacagaggaaagaccatgtgaggacactgtgagaaggcagccgtctgccagccaaagagagaggcctctggagaaaccgaacctgtcaacaccttaatcttggactactggtctccagaactgtgagaaaatacatttctgttgtttaagccactcagtctgtggtgttttgttatggcaaccctggtaaactgatatacccacaaacccaggtgtggaaataatgaagccccttcacggagaacaaacaggctgtttattcagagcttgctgtagcaagggagttggccaccatcacttgcatggggcagagactcaaaggcaggcagaggagtgggaaagtgtcattgggggaaaagggaaggcttcaactaggatctgactggaggttgttggcacagggaaactggaggtggcctaattagcagtaggacattgtattagttcattctcacactgctataaagaactacctgagactgggtaatttataaagaaaagaggtttaagtggctcgtggttccacaggctgtccaggaagcatgattctggcatctgctcagcttctggggaagcctcgggaaactgacaatcatggtggaaggtgaagaggaagcaggcttgtctttcatgactggagtaggaggaagagagcaatgggagagctgctacacacttttaaacagccagatctagtgataattcactcactatcatgagaacagcaccaaaggggaaaccctcccccatgatccaaccacctcccactgggccccgcttctaacactggagcttataatttgacatgagatttaggctaggacacagacccaaaccatatcagacattttatgtgattttggttttggcgaaatatttgactttttttctgagatgaaaatcagggcaaaagtaggaaagctggcagtcgttgaccaagtcctgaccactctgggcccacagctgcagaggtttggcttcatggatcggttattgcagaggctgagggcctgagttctattgctgtgtgtgatctggccgtcgtccatttatgtattcagtgtcttacaggagtggtgggatgtcttctcactcatgtctgcctggctgcatttgtttcctagggctattataacaaattatcacaaacttgatgtcttacaacaggaatgtattctcccacaattctagagacaagaagtctgaaatcaaggtgtcagcagggccactctctctctgaaggcagtaggggaggaactttccttgcatcttcctgtttctggtggctcccagcaatccttggcattctttggccataggagcattcctccattctctgccgccatctttacatggtgttattccctgtgtgtgtcttcacatgtccttctttaaggacacaagtcactggatctagttagggatccaccccaacccagtatgaactcaccttaactaattacacttgcaataactctattttcaaataagcttaccttctgaggtcccagcagacatgaattttggaggagacactattcaacccagtatactagttaagggccctcttttgctgtcaccggggcttaacgcctgatgaatcaggacctgacatggggccacaatgggggattcaactctgtgacgtcttgggacatccagagtagaagatggtaggatgtgaccttttgggtggaaactttgggacccttacgaaagggaggaaaggaatccacatctgatcatgtggagtgattgacaggcccactccaaggaacacagatcctggggccaagctgatgatccggtgatctcctaacatagattttcacaaaggaatcagagagacaactaggatgacttgggggtcggggtgggggctcttgattgtgggaatgctgtgccaggggtttatggagtcttgacataacctgtgagtcttcaaaaagcacatagattgtcaacatgagttgttgaccccaaaactgtatctctagaacagaatattccctggagcatcaggcaggtttatcaaacccagaggagatccacattcaattcgttatgtccagagccaatgagctcattccccaagaccaggtcttcctgtgctccctcttgtatgatgaagggcatcacagactccactttgcccaagcgccaacctgagcatcatcctgaaccacactctcctgcatctagtccatttacaaatcttaccagttgtacctcttgtttgcttcttgctaagtcaagtgccccaaagatgaagggctatcaagggccaccagtaccaactccagaggggaggatgaagcccactctctttctatgcttgacgtttagcatggtgcagtgaaatacacatcaaatcaggaaccatccacaaaacagggatttgaggtaataaggtggtattgcttgaatttttgtcccttttgaaactcatattaaaacttaatccccaatgtgacagtgttggggtgggagtcctttaagaggtgattgagtcatgagggctctaccctcatgaaggaattaacccattccccagttaatgggttaatagattagtgatttatcactggaatgggttagttgtaggagagcaagttggctgtctcttgtgagccccttgccatgtgatgccctgcaccacctcaggactctacagaaagtgcccaccagcagaagactctcactagttgcagcccttcggccttggacttcccagcctccagaactgtaagaaataaatttttttataaattgcccagtctcaggtatccagttacagcaacagaaaattgactaagacataggatcaatgctatgattaaagagttaatatatgcaagacacttaggacaagctgtacaaagtgggtgctacagaagcattagctattgcatggtggtggctgtgcgattgtactattggatagagtcaaggggtctggttctcaaccttgatctgcattaagcagctatggacaagttgcccccactgccccccaccaccaagggacagattcctcactgaaaataaaaaacaaaaaacagaacaaaacaaaacaaaatcagaattgattttggccccttgagagactgaacacatgttctagtgtcactaccatttttcaaaatggttttgtggaattccgttttgcccacggaattcatcatgttttttttttttttaacaaaaatcaactttttattttgcaataattgaagattcacagaaaagttacaaagatagtatagagagtccccaaatacccctcatccagtttctcccattgttagcatcttatataatccattacatttgtcaaaatgaaggaagtggcattgggttactactattaactaaactccagactttacttgggtgtcgctagttttttccttaatgtcctctttctgttccaggatccaactcagggtactcaattgcatttagttgttatgtctttacagtctcctgtggtttgaagcaattggtcagtcttttcttgcttttcatgaccttgagagtcttgaggagaactagcccagtatcctattgaaggttcccccgtctgggtttgcctgttgctttcatcatgaataaacttgggttatggatttttgttaagaatgccatagaggcgaagtgtccttttcatcacatcatatcagggagtacatgatagccagatgatattacttatggtattgacctcagttaaggaagagtttaccttaaccatcactcatttaaggtggagtttcccaggtttctcaattgcaaagcttctatttctccctttctctagtctttggaagtaagtcactaagtctagcctacccttaaggtgtgggagggattgagtgccaccccctagaggggtgaatatttacatgtattatttcaaattcttctttaaggaagatgtgtctcttttcccccattattttatttacttgatcatttatttatatcagtatggagtcatagatatttattttatagtttgggttataatccaatacagcattatttatgttgttgctcaaactgttgcggctttggccattgggagctctttcaggctgattcctgtttctttttgacatgcttccttccctttgatttttgagcacttcctcacctcctggcactacaagatattccaagctcatgttgtatttcccttgctccagccctagaatcagccatttctccaaggagccctcgttcattacattcttttgaatgttaccaatagtggcaaattcaatttctttgtgggtggaattaacaaccaaaagtcaattggaatcatatctggtgaaatagattggtaatcaagagcattaaataacatctttcatcaaaaactgtgtgacggcatacaaacacatatttatagcagcacaattcacaattgcagagatatggaaccaacctaagtgcccatcaacaagtgagtggataaagaaaatgtggtatatgtacaccatggaatactactcagccataaaaaggaatgaaataatatcttttgcagcaacttggatggagctggaggccattattctaactaagtgaagtaacttaggaatggaaaacgaaatattgtatgttctcagttataagtgggggctaagctatgaaaatgcaaatacataagaattatataatggactcatttatccctcaccccccttcccaaccttctctctcaggtgagggatcaaagacaacacattggatacagtgtacactgcttgggtgatgggtgcactaaaacctcagaaatcaccactaaagaacttatccatgtaaccaaaaaccacctgtaccccaaaaactattgaaataaaaataaaaattaattattaaaccccccccccaaaaaaaaaaccaacactgtgtgacagaaagtaagcattgagcccaaagaattgtcaaggctgagaagcaaacacagccagagtttcttttaaaaaaaggcttggccgggcatggtggctcatgcctgtaatcccagcactttgggaggccgaggcgggtggatcacaaggtcaggagatagagaccatcctggctaacacggtgaaaccccatctctactaaaaatacaaaaaaattaactggacgtgggggcgggtgcctgtagtcccagctactcaggaggctgaggcaggagaatcacttgaacctgggaggcggaggttgcagtgagccgggatggcaccactgcactccagcctgggtgacagagcaagactccgtcttaaaaaaaaaaaggctttaacattttccagtcactttagtatttatgcctaaaacaatctgatcagctttctgcttttgtgggatgcattgagcatgaacaatgtcactgatgttaaaggagcaaatgagcattctcttcacttttgaaataagtatttttcttacgtctcagggatgttgaggctttctacagcgaacgttgatgctttacttctggaccataatagaaacactatgttctacgatcggtcattatttttctctaaaacatgtgctttttgttttttcaaacctcccttgaaaaatcagagcaaatgccaaggcttttgagtgtaagtttatcattcaaaattgttggcaagttttcacagaaatttccctgctgtcccagttctcttccctctgaatgtaacactccggccaacgtgctcacaattacttgttcagcgcactgcctggttcagcacttccacagcccttgtgagtgacgaggctccatggcagagccatctccttccttccttaaaccttccatgacaacccctaactcttgtctttgccatctgtgcttggctctttctccacatattcctttttaacatgtcaaatgtcttgctggccccactgtgttactttatgcaaaatgtgaggctctttgttcctaaaactgctatcatttttactcaggcatgagcacccgcacttccttaccctctggcacaaatctgcctgcaaggcaggttgtagcaagtccctgttaagactggtctttgatttccactggcctcaagggacacctccttgggtacacagaaatccatttcattggttggacagatactcacagtgcagagctagaaatgtctgtgctgcccttagaaggactacatgtcactcagctaggagacacccccagaaattccccatcaaactctattccacagagcccccatcaatgacagtaaaccatgccagtactgccctagatcaatcccacacagttgcagcgtgagtctcttctctctttcccttcttatcccaacttacccaaatttaatgaaaatgctgaaatcgaaactgaccgaaatagaaattgctgctcccatatttaagcactgttcagtgcatcttgctcccccacattctggattcttctcccactgcctcattgaaattgctctctagcttcaccaggagctcccttgtggcaaaatataatggacatttttcatttatttctctgggctctctctgtctgtcatggtagaaattgtgtgtcccctgctacccaccccaattcatgtgttgaagcgctgacctcccatgtgactgtatttggagacaggatctttaaggagataatgaaagttaaatcagatcataaaggcagggccctaatccaataggactgatgcccttctaaggaggtgggggtgggaagagagagagagagagagagacagaccagggatgcgtgcacagaggcaaggccacatgaggacacagcaagaaggtgaacatctggaagccaaggagaggcctcaggagaaaccacacctgccaatttctggatcatggacttccagcctccagaactgtgagaaaatcaatgcctcgtggaaggcacccagtcttgtatttgctatggcagcctgagcagactaacacacgctccttctagaaacactctattatcccagctctgtgattctcttcccacctttccaacgattcctggagatttcctctttcaagtattctgagtgttgctgtctctgtcttccatccacagccttctcactcatagcatttcaagcatttcaactcctattcccaagccaaagtcatcaacatctatgtcccctggaacttcagatgtgagtgtccaatttctggttggaagtctcccaggtatctcataggaacctcaaagtcaacacgtgcaaagctgaacttaccccttttcacctgtttgttgttgttgttgttgttgtttgtttgtttgtttttgagacggagtttcactcttattccccaggctggagtgcaatggcacaatcttggctcaccacaacctccgcctcccaggttcaagtgattttcctgcctcagcctcccgagtagctgggattacaggcatgcgccaccacgcccagctaattttgtatttttagtagagatggggtttctccatgttggtcaggctggtctcgaactcccgacctcaggtgatccgcccaccttggcctcccaaagtgctgggattacaggcgtgaaccaccgcgcccggccctgtttcacctgttttgcctgtaaatctgcccccatgcctatggcctctatctgtatttcccagacgcccccaagccagaatcccggccattgtgctaagttgtcttctccctcggttcccacattcaacaagcctcaagagtttgctctgtcccatcctcactgaagcctctccccttcttcaatagccatcacacaggcctttgttgcctctggccaagcctatcacagcaaccatctgatgggctttctcaaatctatcccttgtcctaccggccactgcccttaaccaatattaaattttgaccatgtcaatccttaacatttgacattaaacattaaagcttaacatctttggtgcctctggaataactctcagctaatgtcctcactccttagcaagaatatggggcccagtgcagcgtggctcctgctcaccctccaagctcaacttttactcttttttgcctgcaactttgtgctttagccatgctcagggtgctccttcccgcgcatctgctgtcttctctgagggccccactcgtgtatgtctgtctctgtgtccaaacttctccttttataagaacaccagggggccaggtgtggtggctcatgcctgtaatcccagcactttgtgaggccgaggcgggtggatcacctgaggtcgggagttcgagaccagcctgaccaacatggagaaacctgtctctactaaagatacaaaagtagctgggtgtggtggcgcatgcctgtaatcccagctactggggaggctgaggcaggagaatcgcttgaacctgggaggcagaggctgtggtgagctgagattgcaccattgcattccagcctgggcaacaagagcaaaactctgtctcaaaaaataaataaataaaaaagaacaccaggcatattgaattagggaccaccctgatgacttcgtcttaacttgattacctgtctcaagaccctgtcttattctgcttgggctgtgataacaaagtgccatagtctgggtggcttaaacgacagacatctatttctcgcagttctggaggttgcaaagtccaaggtcagggtactggcatggctgagttccagtgagattcctttctcctctctccctgtgtcctcacacagcagagaaagagagagatctaatgtcttccttttctaataggggcactaatctcatatggagcctccattctcatgaccaaatttagccctaaggttctacctcctaatgccatcaccttgggggctagggtttcaacatataaatttggggggacaaaaatatttggtctataacagaacccgtcttccaataaggtctcattctcacctcaacatatggatttaagggagataacaattcaatccaaaacagccagctagctggggggtgagaaattttgttcaaactttcccacagtgactccagagaaaacttttctctgcaatttgtgggatgggctggcttgaggatgggagtgtggaaagggacagaggatctgatgaaagataccagagccccgacgttgtgatgaactttatagaaaagcttcctgatcgccagtggtgaaggccaccagtctgttcatggcgatgacattctttcctgcccaggatataacattggctgggactgatgccttttgtttccttcattagccactggtctgtctggttttcatcttatcatgattataataggaatagtgattacaatttcttcaacaaaaatttatttgcatctataacacgctgggcattgtaaagattgttggagattttaagctgtgacttcgttgtggtccttgaatgtcaaaaagagaatcacatttttatgtgttactggaaaagtagcgacttcctaaaagtttttttcaccctaattgtgctagttaacaagctcagaagagcagaaaaaaaaaaacaaaaaaagttaccaccaaatcccatgacctaaatttggtgtatcctcttataatttttttctatacctttagaaatgcatgtgttacccttttatatggtttgttcatttaaaaaattttttattttgaaataattttagactcacatataagtggcaaaaggagtacagagaattcctctgtactcttccccaggttccacagcgataacatttttaaaattttttatttttaaaattgtggtaaaatacaaataacacaaaattgaccattttaaagatgttgaagtacacagctcagtggcgttaagaacattcaggccaggcgcggtggctcacgcctgtaatcccaacactttgggaggccgaggcaggtgcatcacctgaggtcaggagttcaagaccagcctggccaacatggagaaaccccatctctactaaaaatacaaaaattagccaggcgtggtggcgggtgcctgtaatgccagctacttgggagactgaggcaagagaatcgcttgaacccgggaggcggaggttgtagtgagccgagactgtgtcactgcaccccagtctgggagacagagtgaggctctgtctcaatacaatacaatacaatacaatacaatacaatacaatacaatacaatacaatacaatacaatacaataaaaacaacaacaaaaaaaccattctcagtgttacgctgccatcaccagcatccatctccagaccttttttccatcttccaaaatggaaactgtgccaattaaacaacttcaccttccctctccccacaggccttggcgactcccgttctactttctgtctctgtgaatttgactactctagggactcaaggggccctggcttccctgctatgagtgaacttgaaggagcagggaggagtttccaagacacccagtttccctctccctgggctgcaagtctggcaggccactgggtttcctgtgttctgggtgacttctcaagcctagtgacctggaacaggggtgcacagtgggaggacagatgctccctgatgtgtgtttggcattgccaatctccttattagcttattggtgcaataagccaccagacctggaaatctcaccataagaggctggctgacagggagcactgatttctagcgtgtgttcttgaggttcaaaagggaaaacagccatttggggtttgcatagagaatgaggtttcagctaaccatggctgattacagaattgctccagcagtgaccgtgtttgacctcgacctcaataccccagcagctgcccctgctgtgtctgttcagtgaaacaacccttgcaaccacgcctccaagtccgtcaccacagatccctcctgcctgagttttcagtggctgctgtaataaagtaccactggcagggtggcctagaacaacacattttattctctcacagttctagtggccagaagttccaaatcaaggcatccaaactaaagctctttaatgttgggcaagttacttaatgtccctgtacctcactttactcatctgtccaataggagggtaagagcaccccaggacactcctggtgctctgcccagacctccagggatcccttttacccattttgtgtgtgcatcccgcagcttctgtgtgctttccttctacctgctcgcacctgcaaccttcttcagacacctgctaatagagctgcttcacctgcaaaggacatagagttggaagtgccggggactgcgtggtgctccctggagccaatgcacagcatgctggtcttcccatggtggaatacaggcttgcagggttcccacctgaggctttatagagagatacagggcatggggtcctccaggcagggtgacaaccgcatcccagtttgcccaggcctttcccagttttagcactgaagtccccatgaaggtgggtcatagacacactatcaagtcacaggagcctagcaggagcctttctgagtgatcatcctgcccttggcatcaggttcatgtctctgtactcacatggatgatgtgggactctcgccgtggctgcaacagataagaccggcactgttgtggagaagcttagggggtttccagggcctcccaagcttttctgctgcctgacttctccctttggctgttgatggcagcaagcccgcaccaggagtgagaatgaagggggcatcctgggcattaccccccttccttgtgactggtggggctattcctggaggaattaactttggcaccattcagggaagctgtgaatgaaaggcagctgcacagacatcataatctgtagccgggaacaggcaggccgctctggcacccagcccgccccgtctatgtggtgccaacagctcctgggcagacacaaccgggaattttaaggcaaggcctgtatttgcagtcctccctgctggccgtaaaccccggcttgttagtttcaaaggcttgaggtcaaatgtaccattataacaagttagaccagtttataaaagaacaccaaggtgggaggttttgccagtatttgtttcacatcgtcttgctctttgatttaaatgttttgatgaactgccctgatggtcatgatgctggtggccagtgaaatcctaccaaacctttctgtgctaattctgcccagaacatggttggagaatccttaatgatcacaatgcagtaattttccccttttcaccattcggaactattgcaaaactttccaagggattggcctgattccctggggccctccctcatcctggaaccctgatatcttgtagaactgccactttgggaggtaggatgtggatagaccaaagcataagaacaatgcttcatggcgtttctgcaacacaagatcttcatttcttaaccacttcctctttttgagtggaattagaggaagtcgagaaaaaaggggattaggaaattcattccagcatacggaataaaatctgtccttcaacaaatgaaggctgaaagggacacgtgaacatttcatctagcacattcctatattcctgttcttagatgatgctaagctgtcctttcagaagaaacccagcctcttcgctgtacctccaaatcccaattttctgtgaacagggacggaggaagagctgccaacaaggaagttacctaggttttgacagcttattagttctattattccgactcaggctcagggctgcatgggccagtagagtgcgggagagtctgagcaacacagggactggataattttctcctataaaattcaatgctgttgttggcttcaatttcaccaaatgaaatctccaaatgaccaatggcaaagagaaagcactgtcgtctcacaaaactgccttgagttatgatttcaatagattctagctaccgtgcttttactaaattcccaaatacctgcagcttttgttggtataatattatttcactatcactaaaaaaaccccaaatcagaatcatttacatcttgaggcatacccagcgagttacaggcttaaagttaccttatctggtaagagtgaaaaccatatccctctgttgtttttctcaaggaatcatattgtttttcattcctatttctggagttacttgtgaggctgaacgtcttttttttttttttttttttttttgagacaaagtctcactcttgtcccctaggctggagtgctatggcgtgatcttggctcactgcaacctctgccttcccagtttcaagcaattctcctgcctcagcctcccaagtagctgggattacaggtgcctgccaccacacccggctaatttttgtattttaagtagagacggggtttcaccatgttggccaggctggtcttgaactcctgacctcaggtgatctgccggcctcggcctcccaaagtactgggattagaggcatgagccactgagcctggcaaggttgaacatcttatgttttttagccatttgcaattcttccagagccttcgacccacatctgttttcttaactctctcctagaatcattttagaattatggagaattattaagggaaagagaagaagtgcacagtaggggatgaagggggagaggtgaaaccaggtggggagcactgttctcaagccctcccccagctccctctgacttttctttccccagggctagattccctccaccccactcctatttttcctcgaaggccatgtcaagtctcttaggataagtccctcttctcctctaataacttactactcttgatcttagccgaaacgctgagaagtgattcttataataatttgttttgcttttaatcattccaggtaaagggagaggacctttagtcttggatcctgacctccttttaggtgaaacttcctctgaggacaaagtatagtggtcccagtgtccctgtctcatttaaaaagtaaaatactggtagtatagtttgggataagcaaactaagtagtcagattctggcattctgaatcttccttttgcttaggaattgctaaggccgagggttgtctctggctcaacatttgcctgaacgttcagtctcctttcgggtctgtgagggagcaaatgctactgcgggagcctcagggagccctgcccacaccttcctcttcccttccttaaaggtcacgatagctgggttcatcccgtagttggatgtcaagtttgcttttaaaatagattgtaacacttaattcttgctgtcatcctgtaggaaataccacgatccagtggtagcctccaagtatatcaccctgaaaacaattctggtggtctcaaaacagaaagcacagaggcccaattaagatgctcaaatctcatggtttattaaatctacgtgaaacacacaagaagaagcaaggggatagggatgggttaggtagtgtattagtatatatgtatatatacgtatatatgtataaaggggagtatattatatgtatatatatgtatatatatgtatatatacgtatatatacgtatatatatgtatatatatgtatatatatgtatatatatgtatatatatgtatatatgtatatatatgtatatatgtatatatgtatatatatgtatatatatgtatatatatatgtatatatatgtatatatatgtatatatatgtatatatatgtatatatatgtataaaggggagtatattatatatatatatacacacacatatatatgtgtatatatacgtataaaggggagtacattaaatagtattaactcacacaatcacaaggtcccacaataggccatctgcaagctgaggagcaaggaagccagtctgagttccaaagctgaagaacttggagtctgatgtttgagggcaggaagcatccaacacaggagaaagatggaggctgggaggctaagccagtctagtcttttcacattcttctgcctgcttaatatcctggccatgcgggcagctgattagatggtgcctacccagattgagggggggtctgcctttccagtccactgactcaaatgttaatcttctttggcagcaccttcacagacacacccaagatcaatactttgcatccttcagtccaatcaagttgacactcagtattaaccatcacaggtagccacactgagtatagtgtgaaggtggggtggaagaccacacacctcagtccggagttacatgatgttcatgcatcctatttctctgctgtctgcatctacctcccccaaggaatattgaacagcggctcagcaggcagaggtgcctgcaatcaacacttgcttcttttattggagagatgcaggagaaattacacctggtcacagcagcacagtagttcccccgttatctgaggttttcctttttgcagttccatttacccatggtctgaaaatattgaatggaaatgaaatattggtggaaaattccagaaataaacaatatataagttttcaatcatgtaccattctgattagtgtgatgaaatcttgcactgttccactccatcccacctgagatgtgaatccttcctttgtccagcgtctccaccctgtagatgcttagaagtcatctcgatgatcagatccactgaggtattgcagtacttgccttcagatcacctttatttgacttcataatgccccaaagcttaagagtagtgatgctggcagttcagatatgccaaagagaagccgtaaaatgtttgctataagtgaaaaggtgaaagttcttgacttaataagaaaaagatcattgactgaggttgctaagacctatggtaaagatgaatcttctatccatgaaattgtgaagaaagaaaaagaagtgtgtgctagttttgctgtttcagcttaaactgcaaaagttatggccacagtgcatgatgacagagctcagttaagatggaaaatatattaaatttgtgggtggaagatatgaacacacacgtatcttgactgatggtgaccaggttcagtactatctgtggtttagggatccactggggcctgggaacatatctcttgtggataaaggggtactcctgtagtttgccaactagttcaatgaacagttatggatcttatctgtattccttgggcagagcatgtgagatctcgagtgggacatactgagtgttaccggtgggtggccagtaaaaaatgacaaaaccatcagcttagaggttgcatgaccccttgccttataacctggtctttccttcctttccatccttttctatctataattgctcttgctactccattctttttaaaaactcacacatctcttacatgtcactaacttattatctgtacttgacatcttttatggcttctgctcatcttacaagctacttgcttactcgttctctgcacttcatcttttcagttttatacaacccattcattttcctgtcacctattacagaattgaatatcctcaattaatatgactaatgttgtaacttcactttagtgaaggtgacaaatttccaagatttaaaaaaaaaaagtgaattagagttggcttatacttaaggcatctggacatcacatctgcatggaaggttttggcagagtgcacacattgcagttctcgtcagtctctgcccacatcaccggtgggccccaaagacccagggcttacctagattagggtttggaggtggtatctgatctaaataagataaataggctgaggaattgagtatgtccagatgagtgaggctcagtgaagagaactggatgagactcccctgaagggagagagaaatctcatcttctgtgtagtaaaaccttgaaccttgatcaaacagagatctggcctttgccaatggctcctgggagatgatctctaagcccttgagatttcatggcatggtgtgtctttgtttgcccggaagttttgagcaacaccaaaaatgtgatacagtgtgggggcttagggccatgtggtatttgttgatttctggaggggctggagactgaagtcagccatgtgggcagccaaccaagtttaagtgatggagccccattcaagactctagacatcaaggctcaggagagcctccgtggttggcaacagtctgtgcatattgtcccacacccatgctgggagagtgtcactgtcagctccatgggagaggttaatggaagctccacagtgggaactctcttgggcttcaccctatgctcctcttcccttggctgactccgtatccttttcttggaataaaccataaccataaggataacagctttcagtgaactctgtgagaccttctagtgaattacggagcctcaggataggtactgtgttcccttgaactttgcagttagtgtcaaaagtgagagtcctgtggatggatagctcccacactgcatctttccaagcaagagacagacaggaaagggatgaaaaagaatgaagcttagtgtttcccttatgactaagtttgggacttccccttctccatcatccccttcccttccccctatttgtcttgcatgggaccccactggggccagatttccagttgtcaatgaagaagtgaaaatgtttggcagagcacttaccgtcttggatttcagagcattttgcacatacatcctgttaagcctttcctacgttagaaggtgaattaggaaactgggttcatactgacaccttttgtctgctctcaggcacagaataggttcgtgttttggccccagcgaagagcaagcatctcaaagcttccaatgacaagggtcattgctcccaggagggagggtttccctgccatgcctgagctggaaccagctcatcttcagatatatctcattcagcgttgcaaatcagaaccacttgggctttgtttggcttcaggtgtttttacttcaacaactgaacgcagaaatgaattaaagagaagcaaagccaacccatcaagggcagtatcaagttcaaccatacaaaattgccgttttttgtaggccaaatttatacagtccaacttcatacatacaagttcaccaacagctaaagcagtggttctcagtttgactacacataagatacactggggagctttcaaaacaaataaaacaaaacaaaacaaaaaccacgtccaggccataccccagaccaattaaattgaaatttctagggttggaactcaagcaacaagatttttaacactccccaggaggtttcaagaggcagtcaaggctgagaatttctaaaacaaattaaaatatgtgggttttactaaatcatcagtcatccctcctcatgggccccagtcatttaacagactcttaccaggggctgaccatgagccaggcattgatgagatcctgggacagcagggagccccgttcccttaactcgtagccactctgcttcctttccatccgtgcccatcgctctgcacagctgtacctggggttatacctccgagtgacagtgcccatcttcaggtgcccttggggctgggtggttttcccaggtgggctcacctgcagacccctcttagctctttgcaactacctagaggagagcactttttctggggtccccacctggaaaaacagttttctctgtcctctagggccacgtttctcgacaccacctggaaaaacagttttctctgtcctctagggtcacgtttctcaagatatggtccagggaccacctgcttctaaacaacaaagggatgtttgtttcaatgcaggtcctgggcccaccctagaccagttcactctttgctggtggatcatgggagtcaacattttaaacaagagcctctccctaagatgtctgctatgcgcccagagtttgagaaccagccaagggactcaacctggctgcctgggcacagggtcagtgacctcccttttctcacatctcttagcccaggctggccacccccatcactgaccagggaccacatggagcaggctggtctccctggcagcactggccccgtccctttggatttccgtgtctcaggtttgctctgactctcacatcttgtgagatgttggagctctgaaatacctcaaacctcccctcagcctaagggacaggtctgattacatgcacagttgacccttgaatgacatgatttgaactgtgcaggtccacttctacgtggatttccttctgtctctgccacccccgagacagcaacaccaacccctgctcttcctccttctcagcccacaaaacccgaagacaattatgatgaagacctttatgatgccccacttccacttaatcaatagtaaatgtatcttctctttctcatgattgtattaataacgttttcttttcaatagtttatttatcgtaagaatacaggatataatacatgtaacatacgatgtgtgttaatcaactgtttgtgttattggcagggcttcgggtcaacagtaggctattagaagttaagttttgggggagtcaaaagctgtgctggggttttccactgcatgggggtcagcactcctaacctctgcattatccaagggccaactatatcatctatctatccattcatccacccgtctgtttctctcctcctcctcctgctcctcttctctctctcctcgcccctctctctctcatacacacacacacacacacacacacacacacatcccacaccccctgtgcaccaggtactgtactaagcacttgagatatagaaatgaacaacacaaacatctctgctcttagggagcctctatcccagtgaggacagagagacaatgttttctggggaagtggtaacttcaaggacacagaattgttaggaagatattctcccaggaataaaatataatattttaatggctttgtcattccctctttaacatctttccccttcctctacaactgaagaataaggggcagaggattcctgcttcacgtggaagaagtctgagttctacctctgcctgttaaagaggatatgcactggggcagttgctgaaataggtgtggcttgttaattcttgagacaaaaccagaatgaatgagaggtcttgctggctagttcagtatcaggtgaggggtggaaatgagctagaagggtgaaaataccatgttattttaatcacagtgatggttcacgtcaggctccatagacccagctggaatcccagaggctcatttcctccatccaggtctattccacccaggtctattccatccaggtccattccatcgagatccactccatccagatccactccatccaggtcctctccattcgggtccactccatccaggtccactgtatccaggtccactccatccaggtccactgtatccaggtccactccatccaagtgaattccatccaggtccactccatccaagtgaacttcatccaggtgcgctccatccaggtgcactccatccggattcactccatccagatccactctatctgggtccactccatccgagtccactccatccaggtccaatccatccagatccacttcatccaagtccactccatccagatccactccatccaggtccactccatccaggtgcactccattcaggcccactccatccaggtccactccatccgggtccactccatctgggtccgctccatctaggtccactgtatccaggtccactccatccaggtgaactccatccagagccacttcatccagatccactccatttgggtccactccatctgggtccactccatccgggtccactccatccaggtccactctatctgggtccactctatccaggtccactctatctaagtcccagcataggcatactcaaactgagggatgtttgcttaaaagaaaaaacctattgacaaagatgtggactggtttagagaaaccacaaaagacagtgcagaagcctggggaccagcaagagcatagtgctgttactaccctgatacagtttggatgtttgtttcctccaaatctcatgttgaaatgtgatccccaatgttggaggtggagtctactgggagttatttgggtcatgggggtgatccctcacgagtagcttggcactgtctttacagtggtaaagtgagttctcactctatgagttcacaagagatctagttgtttaaaacagtgtggcacctcctccccctctctcttgctccctctctcgccatgagacagaccagctccccttcaccttccaccatgattgcaatcttcctgagcccctcgccagaagcagatgccagcattgtttcctctacagcctgcagaactatgagccacataaacctttttctttataaatgatccagcctcaggtatttctttgtagcagggcaaatggactagtacatacccctttcttggaggggcaaagacaggaagtggttacccccaatcaaagagggcagcagaacagcaagggctatctgaaagaggctgtgtcatctgctggcttgacccagccaactttgagcaactcaacagaaaaggagctgggaaaataaatatctggagctctctcccttatccatcctctgctccctctcactgtgctggtgcctcccactggaagccagagtggagggaggttgtgatacaacctacgtgggtcaggcccacctttcagggtttagtgccaaaggcaggaggatagatggaaatcactggcatgaccatttatcatagcatatccagaggaccatattcccagggaaagggttttgaaagcccaggccttcatgaactcaaacaccctcccctccatcagctatacaactaagccccttgtagctacagagaacttgcccccttcttatcctttctgtgggtgatccagagtaatatctggagagagaaagctgctaaattgcatgaggttcttccaagtcattcattcagatgacccctttcttcccattctgctgttttgcctgtagtgctagccatctgtgggatgtgcatgcatgcaagtgtatctttggtccatagtgcttggatgacagccacagatcttactaactggctcttctggagatgatgggctccagcatgtggtcaaagctgctgctggtgctggtggccactgagccccaggaaatgaagaggaggtttctccctcatgcactttcctccttgcaggggtaagcactgctcagtgtcacgtgcagctgaggcagaattgttggaaagatactcctaacaattgtttccctgctccccccaccccccacccccagacgtacagggatggcctcagcctgtctgacactacagatgttggagttcccaattttgtgtgtgggaggttagggtgtgtgaagggaagctagaggtttgatgaacagagaaccccgagaatggaataattagggaacatttcccaagacccaaaacaaaactgtttccactctgatggcagagtctaggatagcatttttagaggccccttgctgctttttaaatcctgaaaaggtagcatgatgtcattggtgcctcagtttgcatgcatttattaggtcccctgtgtctcagacaggagcagcgcttatagcatggaagcagggggccccagacctgggaggagacagggataggtgaaggctgttaagatgggcctcggctattgcagactcttacccaagcccagcatctgtttctaaaatcctaaatggaaactcaccagacagcccaggagcccctgggggcttctctagaggaagtgtgagttttcctgtctgctcgggcagggtgagaacccctgcaccctctttctccttcatctcatcttcatccagggaggtcccggacttagctaggaaaatggtaatccagagacaatctttgttggctaaagtgctcctggaactaaaagtgaggattcaacatgtgtgagaagagacagccccaccacgctcatgatgtgtagaagcaccttgcttgtgagctagacttgcactggccaactggtggggcaggagagaggcaacgcacagaaaccatgcttccataaggaattctgcttgtattgtacaggccaggtttgcattttccagaaaggccagggtagaggcttactaatcacccaagactgtgaaatcaggcagaagaaacagcaagggctgcttttctgggggtgaaaagaaaacaagctgccatacaagctgggtggggtgagagcctgggaggggcaggcaaccagacccgtcatcctcaggccccagggaggactctgtccactggcgggggctggacctccatcctgttcagcatgaccagactagccatcttctgatcttcttcaggcagcccccaaatcactgcccaaccctgcaggaggccctgccacatagcctttgccagagacagtcaccccaatgtgttcttctgggccctccttgcctcaaaggccacacaaggcgtgttcctcacagcctgcactttgttgtttaggaggtcattcttctgagtaacgaagggaaagattttagttcccaccatctccctcagtagatattcccctacatggccctgaagtgtggctaccatgactcactgcacctgtaagtacagaacatgaccctgaggttgggaggccccagctgtacccacctctttactgaaaaatcaccttggagcttcttgccatgagatgctgctggtgtgttgaggaagcatagactaactacacagggttctccctactgacagagaacagttcatgtatgtttgttaatgagataagatgatcctgggtctagggtcttacaattttacccttaaaaaaatttcaaacatttatttcagccttaccaaaaggaatctagagaatgcattcctatttggttgtctggagcagggattttcaacgttggcacattgacattctggatttgatcattctttggagtggggctgttctgtgccttgtaagatgttgagctgcatccctggcctctacctactagatgccagtagcacccactacacccagccactcatgacaaacaaaaacgtctccagacattgtcaaatgtccccggggcggtggaggtggggaaccacccatggttgagaaccattgctgttagagcaattttattcaaacaggaaatatgtatcaaatacccgtgtgataattcaatatttaaacatcttacctgaaccaggaactggaggggtaaaagtgtgactaagacattatccctgttctttgtgagcttgcaatgtgggactgggaatgtcccgcaaatgactggatagaagacaaaaagtaggtgcctaaaagcggtccttactgagcctcactctttttttttttttttgagatggagtctcgctctgtcgcccaggctggactgcagtggcgcaatctcggctcactgcaagctccgcctcccgggttcatgccattctcctgcctcggcctcctgagtagctgagactacaggagcccaccaccgcacccggctaattttttgtattttcagtacagacgggatttcaccgtgttagcaaagatggtcttgatctcctgacctcgtgatccgccttcctcggcctcccaaagtgctgggattacaggcgtgagccaccgcgcccagccgagcctcactcttgattgcgaatgaagtgtctttcccagaaaggccccagcagactcctcctatttctcattggccagcaaggtgtcacatgctcacttcaagaccaatcactaatcaaaaggaaggtgattgcaagataggcttggccaatcatgactcattctctagggtgcagtgtttttgtatgctcacccacttacctgcaaagtccattttttagttttttatttttttgcaggaaattaaatggaataactgctgatgattcagctaatggtgtctgccacaccatgtcccaagcttaggtcttcctgaccctctttcatccatttcataacacccataaaatatactcttctctttgcagtcacagaaactgccttttttgggggtggggagttctttctatgagaaagccaagttgaggctgcttttgataatgtcatagtaaagtacattgtgtcaagaacagactgataaagggacgagtggtttctgcctcagcatgtgaacagttcattatggttgccgagtcgattcatgctttgaccaaaagtgtttgccaaagcccagaggccaacatcagcattattaataaattggctgttattaataacagccaggccacacaaagaaaccgctggttatgcttcaagtgcttgtgatcaaccactgtgggcgcttgcattgatatagagctgttgagtgacggtgccttgtctggtcagttgtgtgttaggttgttctgcccgtggctgatgtctgtgcaggctgatatcatggcagccaccatttattgtgtatatactatttgtccccttacgtgcattacttcatttaacactcacaatagtcctgggaagcaggtattgccatcaccgacagacacacaaggaagttgactcagatagagacagtaggttcctaatgtcacccagctagtactgggcaagaccaacaaccaggttaccccatgcttgtctgtgcagtgtggcaggccccccaccaggttacttcagggtgtatgtccactgcctgaactctgaaggccagttgatgagccaaagccatcatgcccagccaaacagcagacgtccctgataacccaaacatcttgtagtgtatctgagaacccatcaaggaaaacagtcccatcacacacacagcgggcaaagagccagaaaattagcttaaggatgggaggcagtgcagatctctaaagctattctgctgccatccaggagagcctcacatgtaagttctaataaactaatctactcactaagaatgacttgtgtctgagtcattctgtgttcttttggctccctcctagtttggggaaggtttttctatatgattctgggtttttctgcatatcagatgctaaatgggcttgggaagataaaggaggggccctctgttaggttaaggaatagagaaaagaaagtgagcacagatgtaagatgctgaaggctgttacatcaaccttggagggcggaggaccagcattctctctcatcttctccagggtccacatgacactcaagaattgctggacccctttgggctacccatgcctgcccttttgcagatgttcccttaacatcacctgatgatgcctttcttttccaccctccctccccaaacaattgacacccccccattttgaaccttcacaatggaatatccatcagcataggtccttacttcacaggctggttctatctgcagcgttctccaccacaccttcacgtgagcatgatctcaccttccttcaaataccagctcaagtgccactacctccatgaagtccacctgggtcctctgtatgcttctagtaatttcaaggggtgcccttttgttgcttaatttgtcttgcattagagcttgctgtggggcatctgactctcaacccaattacgagtccttcaagggcagggacttcagcatccctccctagtacctaacagggtatcttgcaagatacataagtttatttaattggatgaaagtggataattcagaattgattgcttgacgtgatcaagcttcagcaacagccttcataaagaagctaaatgtgtccagctcgcattttgagtgtctgcactttactctgggctttttactggatctgtcctgcaaatttagtctcagctcagagaagctgaatgcatactgaaataactcagcaaaatgtccctgaccctctgacatgtgatgcttcatcactgaagtattcctggtcaaatcacgctcttatcaaagaccatttctcatgtgccttcccattctccccctacacatataccccaaagacacaggagagtttaaatcttattttataaagaaagcatcagaaaagattctctgtggcagaagatattagtggcttgagaacaattcatgtctagctggaatgggagtgattgaagtgtttttgtgcatgcagtagattaatgtgacataaaatgtcgtctgagaattcagctagacctagtgggccccaggggctagagttggcttctattgcaatgaatctcagagctttaggatggactatagtttggaatacaaggaagtgtctgaatatgaggacaatttccctctcttcacatttgcctggacaccaatccaattctgagatccaatcatccttcatgtctttgcttactgggagcctggcctgagttaccagctggggtttccaaagtgatgtgacaccacagccctaagatgctcccagtctaggggtggtgagtagcagagcgcacaatagcagcaccaagggcagcttgggaaggggctttcgcacccgtcttcacccttcccccacctttctttgatatggaccaccaacattatctccatcatagtgaatcaatggcttcaagacctgcttccaatgagatgttgcccccaagactttcctctatacaaattctgggcctgtcactgggcaacaggagtgggaaagtgaccagacctccccggtgtctggttggagttcgaggcccacaaggcaaggactctggagtaagggagatgcagccagttgggtttagaggaaaggctttgctctcctagtgactagggcagctggaagacagagtgttgggaggtaggttggagaaggtagtcatagcctcccttgaaaagaaacaggaaacttgccaaattgatggagagaacaaaccacccgacagtgcacaaactgcatctggggctcctggttaagacatcctggagcagagaggagcaggggcaaaagggaaaaatccccaagcccacacaggtgcacaagtccatgaccaatgtccttaagctgaaccatcctcattttaatgctaaaaacacacccctgggtagagatttcagacgctaatgagacatgggatgtatgtgctagcgtgtacagcaatagtgcatgggcatccaggagacctcccatggcatgcttaacaacaatgcccattcccacccttcatgaataatcatgtaagactcccgtaaagggagcttccccagtgtcggtgggtgctgtctcattatctcgagcagcccactctgaacctgctatgagagtgtacttttcgctttgcaataaactacttacttttgcttttgactcactctcaaaatctcttaagcagccaagtcaagaacctgaaccaaccaactgacaacatcaggagaaagggttgatgtcggggggaggttgggaactgaaatagagcagtccaagcctgagcatgaggggctgtgtgcccggagaaaatgaagagcagggctcgggcacgtaatgaaccctgtgtcaagtgcctgggcagaaggcccaacccttgctcaccagctctgccccaaacacctggtccaagccaccgccgtcctcttcctgggctgttctcccttcttccactttgtcccgccattagccagagtgaccccttgggagcatgaaactggcactgccctgcagcttcccaccttagcagggaggaagccaaggccctgccctgtcaccttcaccaaagcccctgctccaatgcacagtgcctcctccagactttatgcctgtccatagcactcagcttcatctccacttcttttttttttttaatttttattttactttaagttctgggatacatgtgcagaatgtacaggtttgttacataggtatacatgtgccatggtggtttgctgcatccatctactcgtcatctaggttttaagccctacatgcattaggtatttgtcctaatgctgtccctccactttccccccatgccctggcaggccccggtgtatgatgttcccctccccatgtccatgtgttctcattgttcaactcccacttatgagtgagaatatgctgtgtttggttttctgttactgtgttaatttactgagaatgatggcttccagcttcatccatgtgcctgcaaacggacatgagtgtgttcttttttatggctgcatatggtgtatatgtgccacattttctttatccagtctatcactgatgggcatttgggttggttccaagtatttgcaatattgtaaattgtgctgcaataaacatacgtgtgcatgtgtctttatagtagaatgacttataatcctttgggaatatacccagtaatgggattgctgggtcaaatggtatttctggttctagatccttgaggaatcgccacactgtcttctacaatggttgaactaatttacactcccaccaacagtgtaaaagcgttcctatatctccacagcctcaccagcatctgttttttcctgactttttattaatctccattctaactgacatgagatggtatctcattttggttttgatttgcatttctctaatgaccaatgatgaggtttttttcatgtttgttggctgcataaatgtcttcttttgcccactttttgatggggttgttttttttcttatacatttgttaggttccttgtagattctgcacattagatctttgccagatgggtagcttgcaaaaattttatcccgttctgtaggatgcctcttcatgctgatgacagtttattttgctgtgcagaagctctttagtttgattagatcccatttgtcaattttgacttttgttgcaattgcttttggtgttttagtcatgaagtctttgcccatgcctatgtcctgaatggtattgcccaggttttcttctagggtttttatggttttgggttttacatttaagtctttagtcttaatcttgagttaatttttgtataaggtgtaaggaaggggtccagtttctgttttctgcatatggctatccagttttcccagcaccatttattaaatagggaatcctttccccatttcttgtttttgtcaggtttgtcgaagatcagatggttgtagatgtgtggtgttatttctgaggtctctgttctgttccattggtctatacatctgttttggtaccagtaacatgctgttttggttactgtagccttgtagtatagtttgaagtcaggtaacatgatgcctccagctttgttctttttgcttaggattgtcttggctataagagctctcttttggttccatatgaaattttaagtagttttttctaattctgcaaagaaagtcactggtagcttgatgggaatagcattgaatctataacttactttgggtagtatggctattttcatgatattgattcttcctatccatgagcatggaatgtttttccatttgtttgtgtcctctcttatttccttgagcagtggttttgtagttctccatgaagaagtccttcgcatcccttgtaagttgtattcctaggaattttattctctttgtagcaattgtgaatgggagttcactcatgattttgttctctgcttctgtattgttggtgtataggaatgcttgtgatttttacacattaattttgtatcctgagactttgctgaagttgcttatcagcttgaggagttttggggctgagaagatggggtattctaaatgtacagtcatgtcatctgcaaacagagacaatttgacttcctctcttcctatctgaatacgctttatttctttctcttgcctgactgccctggccagaacttccaatactatgttgaataggactggtgagagagggcatccttgtcttgtgccagttttcaaaggtaaagggatcaaagcaacaagaagagctaactatcgtaaatatatatgcacccaatacaggagcacccagattcataaaacaagttcttagagaactacaaagacttatactcccacacaataatagtgggagactttaacataccactgtcaatattaaacagatcaatgagacagaaaattaacaaggatattcaggacttgaacttagctagggaccaagtggacttaatagacatctacagaattctccaccccaaatcaacagaatatacattcttctcagggccacatagcacatattctaaaatcaaccacataattggaagtaaaacactccttagcaaatgcaaaagaacagaaatcataacaaacagtctctcagaccacagtgcaatcaaattataactcaggattaagaaactcactcaaaactgcacaactacatggaaattcaacaacctgctcttgaatgactactgggtaaataacaaaattagggaaaaaataaagaagttctttgaaaccaatgagaacaaagagacaacatactagaatctctgggacacagctaaaacggtgtaaagagggaaattcatagcactaaatgcccacatgagaaagtggaaaagatccagaatccacaccttaacatcacaattaaaagaactagagaagcaagagtgaacaaattcaaaagctagcagaagacaagaaataactaagatcagagcagaactgaaggagatagagatgtgaaaaacccttcaaaaaatcaccaaatccaggagctgttttttgaaaaaattaccaaaatagatggaccactagctagactaataaagaagaaaagagagaagaatcaaatagacacaataaaaaatgataaaggggatatcaccactgatcccatagaaatacaaactaacctcagagaatactaaacacctctatcccaataaactagaaaatctagaagaaatggataaattcctggacacatacaccctcccaagactaaaccaggaagaagtcaaatccctgaatagactaataagttctgaaattgaggcagtaattaacagcctaccaaccaaaaaaagcccaggaccagatggattcacagccaaattctgccagaggtacaaagaggagctggtaccattccttctggaactattccaaacaatagaaaaagagggactcctccttaactcattttatgaggccagcatcatcctgataccaaaacctggcagagacacaacaaaaaaagaaaatttgagaccaatatccctaatgaacatcaatgccaccatcctcaataaatactggcaaaccaaatccaggagcacatcaaaaagcttatccaccacgatcaagtcggcttcatccctgggatgcaaggctggttctatgtatgcaagtcaataaatgtaatccatcacataaacagaaccaatgacaaaaaccacatgattatctcaatagatgcagaaaagccttctataatattcagcatcccttcatgctaaatattctcaataagaagtattgatggaacatatctcaataagagctatttatgacacacccatggccaatatcatactgaatgggtatgtgtgcttcttttagtgatgttttgctcctccactcaaccccacaactgagacatccactccatgggagcagagccctctctgctttgttcactgccgtattctcagctcccagagcaaagcctggcttcaaggagtgctaggtgagtgtttatgtactgaatgagagaaagaatgaaggagcaacgaatggtttaattcgtcctctgcgatctcccaaacaactgcgagccacagctgagatgctggacaggcaaaaaaagtgttgggaagtctgggatcccaggaatatagacttcgagggaaaaaagctgatcaccttgatgacagtggccaagagacatgcaagaggaccagggcgggcagaagggggtgggtggggcgactgtttgagggctgcccggggaaacccccttcacacaggcttacactaggctgagagtcccccagcccatggtgcccggctgggcagagctggtactgaagcccattccaaccagcagatggtattccgtagcccacctgcaaaccagcctcttggtggcttcgagaaaattagagtggtcttgctgagggagtcttccctgattcacgctctgtggattggcctggctgctatgtcctgccagggcagaaagagaggtttgacatgaagggctttgttaagacaagtcaatgacctctttaggtggggctctgtctccagcagggaagcgaggtgtgtgtgagtgaatgcgtgtgagcatgacagtgtgcacatatgtaacagtgtgtgtgtttgagtgtgtatgcgcatgtgagagttgtgtgagcatgacagtgcacgtgtttgtgtgtgtccatgaatgtgtgtataagtatatatatatgtgtcttcatatgtgtgaaaatgtgcaagagtataagtgtgggtaagttctgagagtgttgagtgaattcacacgtgtgtaagagtgtacgtgtgtgagcacatacatgtgtgagtgtgcacgtatgtgtgtgcgcatacacatgtgtacacacgagtgtgtgagtgtacgtgtgtgagcatgcatatgtgtgtaagtatacacatatgagtgttgactacacatgtgtgtacatatgtgagtgtgtgagcatgtacacatgagtgtaagcatacaaatgtgtgtgactacatgtgagcatgttagtgtacttatgtgagtgtacacgtgtgtgagcatacacgtgtatgtctgagtgtatgcatgtgagtgtgtgtacacatctgagtgtgagcatacaaatgtgtgtgactgtacatgtgagtgtgtaggtgtacacgtgtgcagtgtacacgtgtgcaatgtacacgtgagtgtcagcatacatatatgagagtacatgagtgtgtgagcatagacgtgtgtgagcatacacatgtcagtgtgtgtatgcgtgtgtacacgtgtgtgaatgtacacagctgtgagtgtaaacgtgtgtgagcatacacatgtgagtatgtgtacatacgagtgtgagcgtgtgaacgcacacgtgtgtgtacgtgtgtacatatgcgtgtgagtgtgtgtacaatgagtgtgtgagtgtatgcatgtgtgtgagcgcacacgtaactgtacgtgtttgagtgtacatatgtgagtgtgtgagcatgtacacatgagtgtgtgtgcacgtggagcagtgcagcggagcaggcaggggcctggctcccctccccttgacagacttgtccggatttcattccttgcaggactctcctgaggatggaggcccttgtcaccgggcatcttgaaaggacatcctgccattgttcacaggactcaactacagactgctcttccagatcttgaaataagtaccccctggcctggctcaggagcctgctaggacctgcacaagatggtgtgtggacacagcccaaggcttcccttccacgcggtgggaggccgaggagtgagaaagcggaattccgctgtgcaggggagctgaccgatgcaccccggggggacgccggccaagtgaatggggtcactccaaggccagggactctccacatcttccatggtgtgacctggatccccacacatgtggtgtcaatcaaaacattgctctagcccggggtgttactcccttcctggcccctgcgctttgtgtgcttgggccgcatgccccgcctccccactccacgaagtgtgagacagcaagacatgaacttgcttgatacctggtccccctgacacgcagctggagcacgcagcatccccacgtgtccagagactgcggacagccatccccacggccacattgacccttgccctgatgcaggcagcaccatcaaccttctctccatggccacctgtctcccccggaaaggacactggagaagcatgtgtgcacacacatgtttagtttgggcgaaacgtgctgctgaagcccaaagcaccacataattcaaggcgtttatttgtggggcccaagaatagacagaatggctgtggagtgccttggctcaggtttccagtaaaaaaaaaaaaaaaaaaaaaaagtctgggaacttgttcgtataaaggggaatatttatagatgctgagggaacctcttattttttctgattcagaatttcctgacatgatttggtgtatgtgggaaaattcccactttaaaaccacagaaatctggtagtcataaagccgtgtgcagaagatcagagctctacacccaggcatctcatgtttaaactacagaaaattaaaggcacagagaaaatcctgaagcaagccagacagcagggaggcaccttacctatacaggaacaaagataaaaattacatcagacgtcttttcagaaaccatataagcaagaagagagttatttaaagagttgaaagaagaaaaaagaaatcaccaacttagacctctgtacccagtaaaattatccttcaaaagtggaggaagaaagactttcccagacaaagactgaggaaatttgtttcaagtagatttgccttgcaagaactgtgtttcttaagagagaacaaaaatgatacacatcagaaattcagcactacatacataaagaacaacttcagaaggagatgccaggtggtttgaatgaaaacacttttctttctggagacagtgtttctgaagacgctgaagtccagaacttcttgaacaagaaactgtagcatggaagcaaagaatttgagataaaaaggaacaaatgctgaaacccttgaacacacaaatgaaaccggccgtgagtgataaaatgagccggttggaatctttggctgaaccatgctgaagaccacccatctatgggtcagaagttaatctgaagagtcacattgatgatttgacttaaatgtgtcctttgaaaggcctgaaggaaaagaacaagaactatacagaaaatagtgcgaggaaaataaaaatgaatgaagagcttgccggacaaataaaaaggccccaaactgaagcattttggcagtgtgaaaattcacagcttgaaaatgagatatagaagctttagctgaagcttcaaatactgcctaaattacatccggaacatgtaatgcaatggcagagagaaaatggctgaggaggaaatacactgcttggaaattaagaagaaacttcccagcgtgtgtagaaatgtgaattacatacatcagattcacaacctctacaagaagatgacccaagacatggacaaagaataaggaagaaccactttcttctatcaaaaggagattctcttctatgaggaaacagtacgggaaaaattggatggcagttctgttgactgagagaaaactcaacgtgctaagaaaaaaaaaaatgatcgcagcaggaaaatcctggctaacgtcaagttcaagtctcacctttcccaagtggcctttttattcctgctgttccaagcacaacacacagaggcccagaactaccagggggtcccctgaatcatcacgttctccaggaaggaggaggacggtgctatgaggctcaaggatctgggtcaccttcagatttcactcagttctcacagcaggggggccctgaacacccacaatcacagcaggacatccgcctgtgctgtctctttaaagtgattttgatgtatttctttttagttcagctgctcttatttaatggatgctaccattgctcttattcaagtagacatagcattataatttgaagacagtttttttttttttttgagatggagtttctctcttgttgcccaggctggagtgcaatggcacgatcttggctcactgcaacctcgcctcccgggttcaagcaattctcctgcctcagcatcctgagtagctgggattacaggtatgcaccaccatgcccggctgattttgtgtatttttagtagagatggggtttctccatgttggtcaggctggtcttgaactcctgacctcatgtgatccacctgccttggcctcccaaagtgctgggattacaggcgtgagcactgtgcccggcctttaagatagtatttttcaaataaaggtttattttatataacacttatgaatacattatttttcatgttgttgaactctctacagttaggccatagaaatcttgttttgttttgttttgtttttgagagagtctctttctgttgcctaggctggagggcaggggcacaatctcggctcactgcaacctccactttctgggttccagagattctcgggcctcagcctcctgagtaactaggactacaggtgtgtaccactgcgcccagcttatttttgtatttttagtaaagatggagatttgccatgtttcccaggctggtatcaaactcctgacctcaagcaatccacccacgttggcctcccaaagtgctgagattacaggcatgagccatcatgcccagcaaaatattgtattttaatttaaatggagggtccgctgttacttaaactatcattgaataacaatgtttagaacaacaaagaccatttctgtacgctagggacagctattagacatttgttcaagtaatttcatatttactacaatacactttttttttttgaggcagagtcttgctctgttgtccaggctggagtgcagtggcgcgatctctgctcactgcaagctccgcctcccgggttcatgccattctcctgcctcagcctcccaagtagctgcgactacaggcgcccgccaccatgcctggctaattttttgtatttttttagtagagacggggtttcaccatgttagccaggatggtctcaatctcccgacctcgtgatccaccctcctcggcctcccaaagtgctgggattacaggcatgagccaccgtgcccggcaccacaatacattttgattggttttaaaaagttgaggggaaacaccccttaacaacaacaattccccactcaaacatcataatgttgttattagattagccctaaattcatagattgatttaggggagtcgatattttgcaaccactttttttcttattttgtaatttttaaagactttattgttttgtttaagatactgtttgttgtttaaacatttctaaattttatacagtcaaaagttttcccttgcatgcggggcttaaagcctagatgatgagttgataggtgcagcaaaccaccatggcacatgtatacctgtgtaacaaacctgcacgttctgcacatgtatcccagaacttaaagtaaaattaaaaaaacaagttttcccttaatgtcacatgcacctgtacacacagacacacacacacacacacacacagacacacacaccccacaatgcagatgtaaggtactttcaattgttatgtcagtacttgaggaaaatgtaaaaataaaaagagccacgattttaaaaacatttttaaaataaataagtgaagaaagaaaaaattgagtgcacaccaaatttgtacatacagaaaagagatctaaatcataaacacacaaaaggagggctgctaatgtatcacacaagattcaaacaagaagcagttcatcctaaaccgtgcagatgaagagatgttgatgaaagcggttttccaagcagtgggtggggataaggaactgacaggggatggtgaggctctcagacgccagcaacagggggatgactgccctcccccacctaggccccaaggaaggagggaggaagtggtgtcatctgagcccagcggggagcttttgagggatggataaaactggtccccaccctctctggtcttgtcttcctattgactactggtgcacaggcagccaccagccatagggcctgagcagtgcaggccagaggagttggcctcctaggcacagagcaggcccacaaaggctgcaaaacaaatttggagaatgaccagttcacttgactctattcgattgaaagagtgtgtgttattgcattcgttcattcccatgtgtatatctaataaacatctattgtacttctgctgtatcttaccatggttccaggtgcttgggatgcagcaaaggaaaaacaacctgatgaggcctatggaccaccagagcttacattccagtgacgggcaaggtcaggtaacaaaaaggaagcagaagttagtgatggtggaaaaggaggaggaagaggaggagatgacaaggtcacaagactggctttggagctctagcagggctggctccctcctacctctgcagggacctttggctgtggtctcggcagggcctgacccacgacagaacttcgctgggaagcagcttcaaagcccagcatggagacagtcggctctgataacaaggcttctttccttaacagaggcttctctttttcctgccatcactggagtcccagcctgatgcagagaggctctattcatgctgtgttcatgctggctggcagcaatggccagaaaggaagcatcatgccttcttcaccattggaagccttttgtctcttgctgtatgtgatcactcccctgtcttgcaagtggctcactgtgctgaactactcagcctccttattgcctgattcagcatagcacaagggtttagagtgtgaattctggtactacacatactagctgtgtgcccttgaccaagtttcttaccctctctgtgtctcagtttcttatctgtaaaacaggaatgctaatatgtggtacatgtcatatacgtttgttgtggggctatgtgatcacataggtaaagtgcttacagcagtgcctggctcacagcagaacctagatacatgtttgctaacagcaattttcctcttgacaacatggagctctggggtaaagagacatgcctagagccaggcatggtggcttatgcctgtaatcccagtgctttgggacgctgaggtgggagaatcacttgaggtcaggagttcaagaccagcctggccaacatggtgaaaccccgtctctactaaaaatacaaaatttagccaggtgtggcagcacatggctgtaatcccagctactcagaggctgaggcaggcaagtcacttgaacctgggagatggaggttgcagtgagctgagatcgtgacatagcagtccagcctgggcaacagagtgtgagactccatctcaaaaaaaaaaaagccatgcctagaaatcaaagaggtgaagcagatgcatggagatccagcccagctgatgggcatgcaggaggtgcagccaggctggcacaggctggccaagcagagtgtaatgacaggcagaaggtagacgggacactcagggggctcagcacgtctgcaagaggtaatgacagctactgggaagctggtgtgggctggagactgggatccaggctaccattattctctaaaccacgggacctccttgactagcccttcctctggtgctcaagggtggggcagggctgagctgcaggttaaatgctcctcctctggggctgagctgagctgggtgtcatgccggtcacctatagaggcaggcaccaccagctcaggtgggattgtcaataaagccaattctctaatgaccttcacagatgggcccaggagaagtgagactgaaacatcccaggctaggcagacacttggcaataccaggaagtcggctgatcctatcttctaggctcttggatattccttttccattgtcctcatgtgcctggagcttccatgccgcctcctggctggccagaggcctctggttgatcatccatctgagcctgacttctccctcctgggcttgtttaaaaatagtactttcccctgctccttcctctcacgaggcccctattcctggatacttatcagctgggccttggatgaagataaactgatagattcatactttatggagtggctgacagccctcaggaacacgtgcttgagggtagcacaccccagctccactggcacagaagcagctgtgcttgggatctttccagatcttgccctatgtatccttcatctgtatgtttatttatatattttaaaatatcctttgtaatacactggtgaatataagtgtttctctgagttctgtgagcagtcgtagcaatttaatcaaactcaaggagggggtcatggaaccccaatttatagccagtgaatcaaaaagcacaggcaaaataacctggggcttgtgattgccccagaagcagagggcagccttgtgggactgagccctcaccctatggggtctgtcttatgctagctccaggtagatggcatcggaactgaactggaggacaccagttggtgtcttgttgcagaatggattgcgtccttggtgtgtggggaaaaccacacacacatttgatcacagaagtcttctgtgtttgttgttgtggagtgagagcagaggaaaaccagattgagtttccccccatcaatttctaacctcagttccccctcagttagacatagtgacccaacacacatttctatcaacaagtagatacagaggcacagtgacccaacgcacacatttcaataaataggtagatgttgggcatagtgaagcaacatacacatttcttatgcaccttatacacatattcatcatgtacctagcctgcttgggctgctataacaaaatacccaggtggctggagtggcttattgatatggtttggctctgtgtccctacccaaatctcatcttgaattgtaatccccacatgtcaagggagggacctggtgggaggtgattggatcatggggacagtttcccccatgctgttcttgtgacggtgagtgagttctcacaagatctgatggttttgtaagtgtttggcagttcctcctttgctctcttttcctcctgccttgtgaagaaagttcttgcttctccttcaccttccaccatgattgtaagtttcctgaggcctccccagctgtgcagaactatgagttaattaaacctcctttatttataaagtacccagtctcaggtattccttatagcagtgtgaaaacggactaatacacttacaaatagcataattaatttctcacggttttggggactgagaagtccaagatcaaggtaccagcagattctgtgtctggtgagggcctgcttccttgttcatagatggtgctttctagttgtgtcctcacatggtggaaggggaaaactctgttctctttagtcctttataagggcactaatcccactgatgagggccccaccctcatgacctaattacctcccaaaggttatacttgttaattccatcacactggggattaggcttaggctttaccatatgaattttgggggcaacaaacattcagaccatagcatatcataaatgtacagttcaatgaatcaccataaaatgaatacactcatgtaaccacaatccaggtgaataaatggaaccttatcattatcttcagccttcctccccacctccactctgtgatcgctaccccttccttctcccatgacttctaacaccacagattagtgtctgaacataaggtatttgtcttgttttgagtctggcatccttccccctatgtcatgttttggcttggagcagtcattcattcagtcacttaagtattccatatatgaatatatcactatttgtctattcattcacttgctaatggatatttgggttgtttcatctttcagctttcaataaataatgcagctatgaacattcttgcttatgtctttccataaacctatatacaggtgtgactttagtagatactaccaaacagttttccaaaagggtgtacagtttttcccttctagcagcgtgtgagagttccagttgctccatatccttcaataaatgatattgtcagtctttttaaatgtagcttttctgatgggtaaggatggtttttcttatggttttaatttgcatttgtctgctgaatagtgaggctccacatcttcttgtttgtttttatgtttattagggtagcctcttttatgaagtgcctgatccattttcttacccatcattttcctttggattgtctttttgctattgtttaagtagaagggttctttatacaagtccttccttacatcttatcctacactgtggctttccactctctctcttttgttgagacagggtctcactatgtttcccaggctggttttgaactcctgagctcaagcaatcctcccacctcagcctcttttccactctcttaatagtgtttattgatgaacagaaactcagtttttgtaaaatccagtaaatcagtattttccactgtggttattgttttaggtgtcttgtttaagaaaattttgcttattcctagctcaggaagacatttccctgttgtatttctaggattgttattgttttggtgttgacatttaggtctacaattgacatggaattgatttctgtgtatgatgcgaggtacctggcaagagaaatatttttccttaggaataaccagttgacttggaatcatcgatggaaaagctcacatttctcctctgttctgaggtgtggattttttttttttttttgatggattttctctcttgtcacctaggctggagtgcaatggcacggtctcggctcactgcaacctctgcctcctgggttcaaggaattctcctgcctcggcctcccgagtagctgggattttaggtgcctgccaccacgcctagctaatttttgtatttttagtagagatggagtttcaccatgttggcaaggctggtctcgaactcctgacctcaggtgatcttggcctcccaaagtgcttggattacaggcatgagccaccacacccagctggatctttttttataaatcaaaaacaagtgtttatatatatgtgattctgttcctggatgttccatcattagatttgcctctgtgccagtaacatgctaccttaattactgtagcttaataataagtcttgattgacagtacggtaagttcctagggtaactctttgttcttgttcttcaaggttgtcttgacttttcttaaacttttgaacttctttacacattttagaatcagcttatgaattttcacaaatatctacctagattttgatttttggttgcatttaatctacactttcattgcattaattcatttggggagaatagatatctttatgctattgactcttccaatctacaatataacatataccttcatttatttagaccttcttaataatattttatgtttttctatgtggaggtcttatatatcttttgttatatttattcctatgtatttaatatatttgatcctatcatcaatggtacagtttaaaatatttattttctaattatttattactagtatataagtactattgattattgattttttaaaataatgatctagtattcagtaaaatctaaatttacttccaaaaatattctgggcgtctggatttgtttcctaggctgctacaacaaagtatcacaaacttggtggcttaaaacaacacacatttattctctcacagttgtagaggccagaagcccccaaaccaggtgttgacagagccacacttcctctgagggctctgggggaacatccttccttgcctcttccagcttctggtggccccaggagttccttggcttgtggaagcctcactcctgtctcttcctctgttttcacgtggctgcttctacgtacctctgtgtctcaaacctccctctcctttctcttataaggatactcatcagtgggtttaggcccatcctacatccaggctgatctcattttgagatccacaacttgcttccctcagcaaagatactatttccaaagaaggctacattcacaggtacagggagttaggacttggatgtagatacggccaattgagagatacaattcaacacacagtagcatccaagcaaatatatgtatttgctctgttcttcacccaagtggtcactgttccataccttgctttcattcacttagcaatgtgcctccaagattgttctgtatcacccgggaggcggagcttgcagtaagcggagatcgtgccactgcactccagcctgggcgacagagggagactccgtctcaaaaaaaaaaaaagattgttctgtatcaccccttcaagagttctgcattctctcaaaggctgcacagcattgcacggggcggaataccacattttaggggacccgtcctctattgctggaaatttgggagagagcagagccttagagcccatccagccatattcaggccagtggccttccctggataggtgcttcagtgtctgtccccaggctcctcctctgtaaagcagatggttggggagatgatcacagcctactttctggctgccaggtattcgggtctactcctcctaaatgattcttcctgtatgttttacgtgggggtcgaggggataggagagggtggccctgacttcccctgctccctgacggggtcacagattgatggtggtttgcatgtgtgggagggaagtgtgagaagaggcagaggatcttgatgcatttgatgaaagccagagaagagggctgaggaagctttctgaatgaggtccagatggctgaacactcaggcaccaactgccacgtccaaaccaagggcttggggtgttggatggagcaagtgtccagatgtctgctgcttgcagcattgccccctctgagaagcaaagcaggattgtccccagccttcagaagttctggcttgcttttcgacttcttgcctttgcttttataatcctctcagcgacctccatgacttactaaggtttctgaaataaaaaccagatgcctgatgtcttaggcctatgaaagctttcctaaaactccttctgagctgctaaagtctcaggctgctagtgactcggaggtgctcaaaaactctgcagcaaaaagcaagtgtcataatattattctctagcctgggttaattatagtgatttttctctattcaaggcagctagaaaatcctctgtggcatgcaaagatctaggttgctgggatctgggtgcatcttgcatttattgtcttccctctagctttggttttctcagcctccagggagaggccactgtctttctacctttaggttacctcaggctaggtttgtacagacacctatccatctcactgtaagccactctgacctcatccactggcagagctagcaaattccagagctttaataggggactgatcagcatagggtgcagcaacgtatgtccaaagtgtcttccccaacttgtccttctcacctggaaatggttcctttttatttgtaagagcaaagttttcagacaccaaaaccatcagccaaggcgtggggggtacacatggcagagagtctggggccaggagacttacttaccttctggcctgggctcagcatgaaagttctcgatcttagcctccaccaatacagacattgactttctgagccccagtttacccatataattattcaaccacaggctgaggctccagaggggaatcaggaacagcccaaactctaaaaaggctcgccgtttaggacgggaggcaaacactcacacaagggttcgaaggcattttaggtgcttcgacagaagtacataggggtgaccatgaaaacacagtgggggaaaactcagttctctctgtctggggagacacacaagacacaagtgcaattatgttgaaaggtgaggccaagcgcagtggctcactcctgtaatcccagcactttgggaggttgaggcaggtggatcatgaggtcaggaattcgagaccagcctggccaatatggtgaaaccctgtctctactagaaatacaaaaattagccgggcgtggtggcgcagccctgtaatcccagctacttgggagtttgaggcagaagaatcgcttgaacccaggaagtggaggttacagtgagctgagatcactccactgcactacagcctgggcgacaagagcgagactccactcaaaaaaaaaaaaaaaagaaagaaaggtgagagggcatttacccagtgacaggaaggggaggacattcttggaagggacggatgagcaaaacccagaactgtgaagagcctggcaggcctgggaaactgcaggaggcttagcatggctggagcaaggggcacaacaggcaatgtggggagggaggcggggccaggggaggggcttcgacaccactcttagggcagaggctgtcacccagggacgatttcgccatgcctgaagacgtctttgactatcacttccagggagttggaatgctactggcatctaataggtgaaggtcagggattctgttaaacgcacagaacagcccctacaacaaagaattattcagccccatatatcaatagcgccgaggttgagaaccttactgtattagtccgttctcacactgctactaaagacatacccgagactgggtaatttacaaagaaaagagatttaatggactcacagttccacatggctggggaggcctcacaatcatggcagaagatgaaggaacagcaaagggacttcttacatggcagtgggcaggaaagcttgtgcaggggaattctcatttataaaaccatcagatcttgtgaaacttattcacttcttctataacagtaggggggaactgccccatcattcaattatcttcacctggtcccgcccttgacacacgaggattattaaaatttaaggtgagatttgggtggggacacagccaaaccatatcacttattctcagggtaatggggactgctggggggttttaagctggggattggcgctcccagcttttttcttaggaagatgactgtagtagcaccacagcacataatcagaggggaaaaccctggcagaaggaagatcatttcaggcaggagctgttatgccttcaggtaggagttgcccaactgcgacccatggtccaaatctggcttgtcatctgtttttgcaggtctacaagctaagagtgcattttacattttttagtggttgaacaaaatcaaaagaagaataatgtgtcacgtaaaaattatataaaattcaactttcaatgttcatacatagttttattggaactcagccactcttatttatttacacattatttagagctgtttttgccctacagtgatagaattgagtagttgcaacagagactgcatggcctgtaaagcctaaaatatttactatttggccctttatagaggaagttggtcagcccctgacttaaaccaaggcaacagaggtgaagatgacagaaagatataggcccaggagtgatgtaagaggagtaccattaatggacttggccagtgattgattatggggtgaggaaaggagatcattttctagcttgggagctttggtaagagagaaaaaagagccaggttttaggatttaaagacaggttggctaggtgaagtggctcatgcctgtagtcccagtaatttgggaggcaaaggcagatagattgcttgagcccaggagttcgtgatctgcctgggcaacatggagagacctggtctttacaaaaaatacaaaaattatctgggtgtggtggcatgtgcttgtagtcccagctactcaggaggctgagacaggaggatcacttgagcccaggaggttgaggctgcagtgagttgtgatcgtgccattgcacttctgcccagatggcagagcaagaccctgtctcaaaaaaatacaataaagacttaggttttggacatgttgggtttgaagtaactgtgagatgactaggccaacctataaaaggaaaaccaaagctagtgggaagacaataaatgcaagatgctcccagatcccagcaaccttaatccttgcatgccatagaggattttctagctgccttgaatagagaaaaatcactataattaacccaggctagagaataatattatgacacttgctttttgcagcagagtttttgagcacctctgagtcaccagcagcctgggacttcagtggctcagaaggagtttcagaaaagtattcacaggcctaacccatacacaggactggggcataggaaagacgcacaggttggaaatgaatattaacaaatcttcagcctgtggagttgagatgaagccaggacagcacatgacatggcctaagacaatgggttgtccttgtgtaggtaacagcaccctggaggaatcttttgaaagctttggctttctcctcagaacaataacacactcaaaaatcgtcatatggcttctggttctggaatcatgggtttcacgaagtcctggactcaaaattaagaacttttgacctagaatgaatttatgagtcaaaggaaggccaagcacaggtagatgggcacatcaacatgcaaggcatgggcagagggagggagcccacgtaggagactgagaggggctggatggaaagagaggaagagggcagagggagggagcccatgtaggagactgagaggggctggatggaaagagaggaagagaacagaggtgctctaaaaaccaagcaaagaaaagcatgtgccaagaatggatggaaggatcaacggtgttctagctgcagagaattaagccacatgggctgatgagagtctactggggatttaagcgtggtggtcatgggtaagctttgcctgaacctctctggggaagggggaggtggagacagggtaggctaacaactgagtgggaagtgaggtggaagagacatgagtgcaggctcttttttcaggggtttgggtatgaggaaagaggaagactccagcaggagtagtggaaggtgtgcaaagagctgaaggacggacagttagagtgtacagctcatattgtcttaatcccagaaagacttgagttgtataatattttgccaattaccagctgtattagtctgtttccacgctgctgataaagacatacctgagactgggcaatttattaaaaaaaaaaggtttaattggactcacagttccacatggctgtggaggcctcacaatcatggcagaaggcaaggaggagtaagtcatgtcttacatggatggtggcaggcaaaaagattgagagcttgtgcagggaaactcccagtttttaaaagatcaaacctcatgaggctcattcactgttatgagagcagcgcaggaaagacccatccccataattcaatcacctccccccaggttcctcccatgacacatggaattgtgggagttacaattcaagatgagatttgtggggggacacagcaaaaccttatcaccagccaacagggagagactgaaaagacagtagagagcagagagaactgaagaacacaattttggtcctaaggaagatggtacaggcaggtgctgtggtggggggagtcggcaggtcaagaggtttcattactgtccccgaaccccagttcccacattcccctttccctatcaggcaacacctcacctgccagactgacttcagctgaatgtctgtgggctactctggtcattcctgccaatttgggatagacactgatctggctggaaatggtttttgaacttgcatccaaaacacatagcctaatttgaatctcaccagagaagtctggctccaaagcaatatttgaactcaaatttattgctgctattagctctttctaagagaatcataagtagatgttgatattttaatgacagttatgtcactggctggcatatttaaaagtagtcattttaagatgtttcaacagatcagtcatgcactgtgtcaaatgagaggtgcaaattagcagtaaaatatataacaaactgtccctttataggtattgccgaatttgagaaatccaatagaggggatataaattactgtgactgatacattagcagtccatcagtctgcatatccagagaatctgctaacatattcctataaatactgagtgtgggagaatgctcttctggtgattcccagtgaactgcacctcccagaactcactttaaatttggccttgcctgggcctgctttaatgagtcaagtgtgtggcagaagtgatactgggccaattctagatctacatctttttttttttctttttcatttttagagccaacatcttgctctgttgtccaggctggagtgcagtggcatgatgacagctcactgcagcttcccctgcctgggctcaagtgatcctcccacctcagcccattgagtaattgagactataggctcatgccaccccacccagctaacttttgtatttttttatagagatgggatttcgccatgttgcccaggctggtcttaaactcctgggctcaagtgatcctcccccgacggcctcccaaagtgcagggattataaatgtgagccactgtgcccagcccgtgtctttcaaaggcccaacagcatctgcttttgtcctctgggggaagccagctgccatgtaagaagtccagctaccctgagatgtcatgccaggaggaaagcccacactcaccatgtgaagaggccacagcgggagaatcaaggaactacccacttcacactgggcaaccgtgacagccgaggccccagctgattacccaggttgagccattctagccagctctagctggtcaatctacccaggttgacaccacgtggagcaagacaagctctccccattgaactcttcccagattgcaacatctggagggaataataaaatgatggcttaagccactaaattttgagtatattgttagagtatattgttttgtagcaataagtatgagcatattgtttgagtatgagtatgggtattatgagtattaggtatgagtattatgtttgagtatattgttttgcagcaataggtaacagaaacatggcgctttctggcatgttttgcttgtttgtttgtggagttggggtctcactatgttgcccaggctggtcttgaactcctggcctcaagcaatcctcctgcctcagcttcctgagtagctgaaactataggtatgagccactgcacccagcatttggtacattttaaatatgcagaatgggagagagtcatgtacatgaaatgtttggaaaggattagtccatgaagctggatcagttggttagcctgtggtggcgatgggagggataaagttagatctttcacttcaatctagatgaaaattaattccaaataatatttgcacaacacttctgaaaaatgctgtaagacatgtcagcctgtattttcatcagcttttagtttacttctggggatttgggagtggaaagggagtgggggcataaataatgtatgttcattgcataaaaattcaaaagtccagatgagcaaagaaggagaaaaataaaaattatccataatctcatcacatagaggtaaccactgttagcatttttgtttatattctttcatggtttttccatatattaataatcataaaaaataggctcgtattgtataattgttgtaacctattttgttttacttgacaccatatcacgaacatctttgaatgtccatcaataatgcatgtgttatgaatgcataatattacatcgaatagatgttccataatttgctcaacaaattccttactgctggatgttgaggctggttccaattttcctcgtaggtaaatcttaatgtacatacagaattatttccttagaataaattccaaaaagtggaattgcttagtaaataagtttgcatatagtgaaggcttttcaatacaaaatttcaaattactctcaaaagtgatcagccttcttggtaatataagagaattactttctcccccttacatggtcttacatgtagttaatattactttttttttccttcggttttcaaagaaggcactactgtttgacaattgttatgagtgtttggctaaggcacatgtgtttcaactccaaataaccaaacgccaagtcagagtggttgtgggggcggggcatgcatctagtaaacattttaggttttgagatccaagaggcacaattgagaacattatgtaggtatttatataagaatgcaaaaatgtaaaacacctagatgcctcacagttacttcaaacccaacatgcccaaaacctaagtctttattttattaactcataacttcttaactcctaactgtacaaaaaccagtggtgagtccgtttgcccacaagccatagctcactgactgctgctctaagcggttgctccttctgcttgaagcacttcactggataatttttacaagtcagggtagtgagtccatgttgggtaacgcttagggtacaactgtccacaaaagtcccttatggaggaatttactagaatcctaggttgccatcatttggtgaactttattttgtatgacctcttaaagaatatcccagccatggcatgggtatatgggtgggtggtgtgcaggaagagtcacgtaaatattcacagctacgcagcatccaacttgcagagtcccctgtgcttatcaccttgctgttaggagatgggggctcatgtaagattttgtgtgttttacattataaaaattgtttttttttcttattaaagaagtactacatacttgtaaaaagtacaaagagtgttaatacactcaccctgctgacagaacctctactaatattttggttaatttccttttaagtgcctgtgtgatagaaagagagagagatagggagagatagagagagaaagagagagactccaaaacagacatcatatttgtatacagtgtggcataagtttattcacttagcgttagctatgaatgtcattggctaattcatatcccatcatgaggaagtagctttttcaagtgaattcccagctgatgggcatttgggcctttactagtcttccagtgttataaataatgctataggaaatatctttaaatgcaggtcttcgttcatgtttttatgtcttttattatttcctttgaataggttccaaaagtgggggttacagctcacagagtaggagtgtacttgatatcttttatacatatttctactttactttgtttttccagaaaggctgccgtcatttagagcagtgtactagtgtgatcattatcacatctttaggataatataattttcaaaatatttgctaattttgacaggttgagtgatattttattgttggtttaaattatattgatttaatttctagctttttaaaaactattttcttatgtgttttatttgtatttcttttgtgaaatatgtattcagattcttttttccattttgttgttttccccccattttcttattgttttgtaagaattctgtaaatattcataatatgagccatattgcatatgtacctactgtatatggtgtaaactgtgttgcaaacattttgtgatttgccttttaattttgctttggatgtctttctggcatgcagaagttttgtatttttatgtagccaaatctagcaagctttttctttttgactccttttcttactttcatgtttgggaggttcatctgtgggatcatcccctaatccatagcacctttgaagtttcgtttttaatggcttcatgttttacatttaattctttaagccatctggaattaattttggtctaggttgaagtgaaggatataactttatccccccagcctcccaaagctaaccatctgacctggctctattgactaatcctttccaaactcctaatgtgcatgactttctcccactctgcagtattggactgggggagggggagggagaaagagagaggaggaggaggaggaaggggagagattctttagtcacacaccaaagttgcacagctgtaggtgctgcagagacttttgtccctaactgtgtgatcacatgtgatccctaacgatgcactgaagggcgctgctgactccagaacttcaatgcttagtggagcaacaagcaattggccaaggccgtttctgaccccaactccaagtcctctgacacaactcagatttaagctgaattatcaacctaggttggggagaggtggcaagtgtctttgtctctcaagcactcgcataagttccagagtgcttcgttgaagaatggcgctggaccttctaggaggagatgctcccttcagccacctcccccaactatgtgtggaaacagatcctgttacccagaaattttcagagatgtgtcttatcatctgtctcccagagaccagagccttggccaccaccctggctggctatgaactccccttgctggtttccactctgccatattattcatttaaatacttactgtgtggacaatgtgggatctcaaccatgacacacagcccctccctgtcctccaggaattcacagtctgaaattgcttgtggccaatagacattttacttgtacgctatgctagaggatgaatagcaggggctgtctccttgggactgcaaccctggacctacctgctaaacctaaacatagactaaaccagcatttcctaagtacctatgatgtacgtgggcatgagggattggggaagaatgagtgcatacactttatgcatatgtttatttataaatattattacaattatactcgttcttattttgtatatagatgaacagaatcatgtataaagtctttctgggctaggtttctaaggcattgccaagttaagtaggtacctgctcaaaatcaccctgggaaatggcagccctgggggtcaaccctgaagcaacctgctctcccaggctcgtggtccttcctcatgatggatcagtgcgtctgacccatcatcactccccctttcatcccatcctctaacgtatccatcgccatgcaccaggcgccagcctttgcgtgtcctaactctgaagacctcattcagatgtcttctctttcctttcagttattttgctgtttcctcacatccaccagcatgaccgcccatccccaaagagctccttctccctatacatttacatttgcctttgcgcaatgatgatatttgcgtaagatgttttttgccctcagcccaaaagggtgcagccacattacacatataatcgggtgtggtggttctttaccttaagccttgatgggtgtacatcgatagcacaccggggcagagaggtcacgtgtgcaaagatttgcacattagaaataatataacccttgagggatgttgcttttatttcttccctatacacccccagcttaattattattgacattctagtgaagtattattgttattttccaaagaaagacccttgtcttctgcagtcttcatggaagaatattcaaggaaagtctggctgttactattgcctggaggtgtgaaatgtgaaaggcagtttgcagtgtgttcctgacgtctctaaagtatgggcagagggaaacagacataagatattgtttaaagcagtttcttttctgggggctcagatcccatgggttcaaggagcaccaatttgcctacctctctgctcctcttcctcccctgacagggccatgtgagctcagccttgagaacccaagcaaaaggaataataatagcaacaatgaccctgtgacagcagcattgttctgtttccttcctaggtgctgggtactatgcttggcgctttatatgaatcatctcatttactttcacaacagctgaggcaggagctccttttgtcatacccattttacagatgggcaattgaggatcagagaaattaagaaatgagcccaaagtcacatagctagcaagtggcagagctgggttttgaaccagactttttggctccagagtcctcactcctaactattagagctcttctgcttctgacattgaagcttagtttatggggttggtatagagggtctaacagtatgtctgacacctactaagtgcctccaaatttaatggtggtagttgccattcctggaatttgtgacttgcttgtgaaacagctccccttggccaggagtggtggctcacacctgtaatcccagcactttgggaggctgaggcaggcggatcacgtgaggccaggagtttgagaccagcctgaccaacaagtcaaaatcctgtctctactaaaaatacagaaattagctgggcatggtggtgggtgcctgtaattccagctacttgggaggctgaggcgtgagaattgcttgaactcaggaggcagaggttgcagtcagctgagatcgtgccactgcactccagcctgggtgatgaagcaagactgtctcaaaaaaaaaaaaaatccagacaaaccggaaaaacacaaaacaaccccagctgtccgtgggctatgtcctaatggggtcctgactcctgtatgctacctccttctagcagttgcagccactcaatgtccacttgaggggcagcctccattttcacgagcaatgctgagctgagggctggggacaattaagtccctccagatggattgttgaccctgattcctctgacaaggattctctcctccttcttcctgcctacttgcctctgttcttccagtcggggcctgtcttggtcttagttctcaaccttccacctttcccagacgtgaggccacactcttgcccgccgtgaacagatgctgctccctgtggacctggctgtttgctgtgggctcttctgcagattatctttttgtcagggcccggctctggccaacttgtggtgttgggaagcatcacctacctacaggctgccataaaccagaacggagagaccatcaagcttctgggaacaatttggaatctaaatgttccctggagccactgtaatttgggcagagaggggaaaacctcagtaaaaagttgaagggagagaaatcaggatcagggaggagagctggggggcagagggagagaggaggcacctggagacacctgttcctgcggcaggacggcgggtgggagctgtacctgcaggcggctctgtatcctggccaagatgctccgcccatcacctctgttgccaccatgttgccaggaaacatttggattgcattctaccattgaagaagccctgccaagagggccagtcagggccaggacatcattccctcctgctcacggctggccgtgcccagctggctatccagagggcaccagcatcagggatcaggagctcaccaggtatttctttgcatggtgagtggtaacttacaaagcagggccctgcactgtgaataggcaagttcagtttcgctgggtcttgacacagtgtggttaaataacacctgcagatggaatcaccaggagagcctgttaaaatacaaattcctgggactacccctatgtacccccaaacttagtcaaaactcccactctgtgccaagtactgctcaactcactttatatgtgttaactcacttagagttaatacctgcaaggtaggtgctactatcattgttcccattttacagatgaagaaactggtgcagagagggctgggaaggcaccctggtcacacagctaataagaattgggatctgaactcaggctgagtggctgcagagccctctgccaggccagcctgggagcctcctgtctcagacagaaaagcctgtccacttgaaaaatggacatcagcaatggcttttcaacctactgggctaattagtgctcacttggaagtcatcagcttaaaccaaatattgttaatctataaaattcctatgaccatgggtcagccaccttgctgccctgtaaatgatagggtattatcttcccaaactcaataaggttttcaacctatttgggagtcagtgacctccttgacaatccaatgaaagtgtggatcttgcccacataacaaaagacacctattcacatttaatatgtaatagcaagaatgcccaggaaatctgtggatgctatgttgtgaaccccaacctacatgaatacatgaatcttccctaaattgaggttccccccatccctcatctctttgtctcttaaaattctcagtaagaagggaggcacacctaggaaaattatttgattggagtcaaagtaattaaggcacaactttccttccctttggtacttgcaaacatccatcttaattaaagtgttcattatgaggccagtgctcggggctgccaggagactggataagacagaaaaccccttaggattatgagaggtcactgcttattgaacctgggattctcattactgaagcgaccctatgccttgggtagcttaaggaagattctctgtggcagcagacatgggttctttgaattttctttgaagccagtttttgccataaactgtagagttaccttacttgtgttattcaatgaatgttctttccctacagttctaccttgggtaagtaggttaaccaattaagaaatgttctgtgacagttagttttatgtgtcaatctgatgagactctagtacctagttatttcatcaaacacggatctagatgttgctgtgaacatatttcgtaaatgtggttaacatctacaatcaggagactttaagtacaggagcttattctcaatactgtgaatggcccactctcaatcagttggaagaggcctcatgaggaaagactgacatttcctagagaagaattctgcctcaagactagaggatcacactcttgcctgagtttctagcctgctggcctaacctacagattttggacttgacggcctccataattgcagaagctccgtccttaaaataaatctccttagatagatgatagatagacagacagacagacagagatctgtatctatctctatctacctacctacctatcaatctatatctacctaacatctatctgtacatatgtatctcccgtttgttctgttcctcttaactataatatgcatccgaaagagcacagtcatctatgtggatgacaattgctttgtaataaataaaagagctgtatgttatcaaatgtcactcgattacccacatgccctgctcccggcccctggaaggagcgatgtgaagtcagaacggtgagctgggagcaggcagtcaacttggtccttctcagcttgactatgtatcagtgtcactgtagggggtgtgggaggtatggggtaggaagagtttgttaaaaatgcagcctctcagagttctaccctccaaagttctgaatctatgggtccgggtccagaagtctgcatcttaacaatcccccagagtgattctacttcaggcggccctttgagaaatacagcttacaggatggcccccaagcctccagaccaggcccaaatccattctccattttcccattaggtccttcaagtgctgaagctaagagcaaggggggccagtttttaccccctggttagtgccctggcctggctgtgcctcttgaagtccaaacacttaatgccaggaaaggtacatgtgaggccttctagctcccatggtgtactgactaagctgatggactctttaaccagaccgcgcagcgttcaaattccagcttggtcttttaatgactgtttttacaactgcatgtcacactatttctttgcttctgcaattgtggtatcatcttctgacgtgacatatggtgggcttgctccacttgccaatccaatagcagatttgattttacctcttcccacaatttcaggtttaaacagcaaaatatgaatgtgttggtctgaataccctggtggcttcgcagtttgatactgatctgcggcctccttttatagtacaatcctcatcgagtcagtacgataggaagaaactcaagacgcactccaggcactggtcctacaacaacccccagctttgaggctttccttccctcccgaaaagcttctctgggtacacgcagagtagctttgttcctcctccaacaaagaaagctggcccatcccttcccaacctcaaggtacattcccattagctgatgtgaaccttgtttgcctgtgcttgagaatcaagaagaatggggccgaccttacatgtgactggatctttatcgaagtctttaccaggaagacagctatcaggatactatgaaggttacgggggcagagcaaggaggacagcgggggtggtggcgctcataaaacttaaagataaggaagcagaggcctcttgccgtgtttgttcagaggatcttccaccttccatggccttccaataactgatctcccctaccttccagcacttgctgacctgccctcacctcctgcctctggcctcttgcagacacagacctgcaaaacatctgcaaaaacagtgctgggctgccctggctgttaacagaggactcacagagtctatttagttttcgagttctgattttatcttgtttataaaatccatatggagagagaaggaaaaagagagtagggggaacaaataacttcaggctatcaagagtaggttgataatcaagagtacgttggcttctggcagatgtggtgtctcttttgggcctggggtttggctttgccgattccattgctcacagcttctcctccggtcagtccagctgcttatttgagcattttgcagaagaggaagtttaaactcagagctgaactccaggattgaggttgttattaactttgtcatctgagcttgtcctctctcatcaacggaagagaagttggctgtatctaatctggactagggctctgaagacccgatccgggtctctggcacctgctggctgtgtgactgtattagtacgttttcacattactgataaagaaagtttacccaagactgggtaacttataaagaaaaagaggtttaatggactcacagtcccatgtgactggggaggcctcacaatcatggtggaaggtgaaaggcatgtcttacatggcagcaggcaagagagaagcttgtgcaggggagactcctatttataaaaccatcagatcttgtgagacttattcattaccacaagaacagcaggggaaagacccgcccccatgattcaattacctcccactgggtccatcccatgacacgtgggaattatgggaactacaattcaagatgagatgtgggtggaaacacagccaaaccatatcagtgaccttgggtgagtccaaggccaggctctctaagtcttggtttttcatctggaaaatagaggtaatacaaggaatgtttgtgaagagctgacacataatgagagctcaaaacatgttagctatttggtcttactctttctcccttgtaatgacttcatcttgtaagtgccacatgcccttccctggatcaccttccctaacttatatggctgttggagaattaattgcaacaagggtcacaaacacatcttgtaaatgtgattcaaactccacactaatgcccagatcatcataattacctctctaaccttcatcttgctttagtttatctttccctccatatctggaataccctccattctccccttttttctgcttaaaaaattcctgctgaagatccaatcaagtatccctctctctaagaagccctctccagcctccccaggcctctggctgtttcctttactgaatgcatagagttatatttatagttttccatcctgattccatcatttgaatccaagttcttctaaggtcagaagctagaccatgttctttcacaaatcctagggtctagcaaaatactttacacagagtaaggacctggtaaataaatggaagggtggatgaatggatgggtgaatggatgaaaagatgatgaatggacagatggatggaaggatggacggttaagtggttgaatggatgggagaattttgtagacacgtctcaagaaccatcaatagttgatatccagtctctcaatgtctctactgtgctaaaatgattcccttgtcttcagctgacatttatcagtgattggtacaatgagcataggaggactgatggacttctagcaaaaggttaattcactcaactccacatctaaaatatgatcttaggagattttggcctgcagttggtcttctccaggggagtcagcctatggcaggttggatgctcatcccagctggaatcatggtgtctgtccaactcttccaactcctatagaagaactgccatggcaaactcaaccaaatatgtcacagcctttgtgatcaggaagggtttctcagcatcctttacaaatctctaaagctacggaagaaaattactacctcttgttaagatggaccatggtatttaacaaagatcgctgggttggaaaccaggacgtctatgctcttggcctggttctgccactaatttgttctgggatttgggaccagccacttcacctccatagaccttagcctctttgtgagaaaaatggggactgtatgatttcaaggccctgttcggctctgcaaggcatgatttcatgttctgcagggccgcaggctctaagaccccaacttagccctgcaagatggacttcagaggcccttccctgcaatcctcctgcttggccctgctgtctgcccacagacttcccacggagaggagaacacagcccacggtggttaccagcacggagcttggctctgttgcccactagctctgtggccttcggcaagttccttaacctctctgtgcctcagtttcctgatgcataagatgagataacaaagggacccacctgctagggcagttagaggataaaaggacaaaatgcacagaaagtgcttattatggtgccaaatgcagaggaagtgctggagagatgggagttatgatgatggtgtttatgagagactgatggcagaagccacagattctggcctctcatccattgagacctccctgacagccgcctcaataccaggactcttagatctgcaggtcctggttcttaaaggcacgttcagcctccacactcctgatgtgtgcctgggccaaggatagggagccccagcagcttgaataaaaccattgtctggataaagggggagcccacagggagcaggggccgttcctagctctctgggctgcctgagcgccccttcctctattttctccccttgttcttgtggccctgtggctgcttttatcagagcagaggggctctgacccctgacgggggaaaatggccgccctcctcccacatggcaattattctcaactgcatcagagccagagctctgggcccaggagggctgctttagcacagggtgggcttggaggaggcagctgttccccatcggaacattttgaaagtggctttgtctccaaccagcaaccctttggcgccggattcctgtgcaccttcgagcaacaaggcagcaaagtggtccatccacccacagaggaagaaactgcggccgtcccgctgatgctgagaaaaggagcgctcagctggtctttcggtctgcgggggctgccgtgacaaaacaccacaggccgggggctcacacggcagaaatgggtcgtctaagttcaggagggtggaagtctaagatcaaggtgttggcagagctggttcctcctgaggctgcgagggggaatctgtcccaggccctcacctaccctccaggggtttccagcaacctttggccttccttggtttataaatgcatcaccatggtctctggcttcatcttcacatggattttcctcctgtgggcctgtctgtgcccagattttccccttttataaggataccagtcatattggatttaggacccaccttacaccagtacgaccttgtcttaattaattacatctgcaattactctatttgcaaataaggtcacattctgaggcactgggggttaagacttcaacatatgattttgggcagatggtgggggcaaaattcaacccatagcatttggcatttggcctttccttaaagaaggagctttttttttttttttgagatggagcctggctctgttgccaaggctggaatgcagtggcgtgatcttggctcactgcaacctccgcctcctgggttcaagcgattctcctgcctcagcctctcaagtagctgggattagaggcggacaccaccacagccgggtaatttttgtatttttagtagagacggggtttcaccatgttcgtgaggctggtcttgaactcctgacctcaagtgatctgcccacctccgtctcccaaagtgctgggattacaggtgtgagccactgtgccctgcctcaaggaggggcaatattaagtccacctgtgtctctacgctcatgcgaggcagccagcaggtgtttcctaggcctctgggcagaaaggagcctggaaggtcaaggtgatccatcctccattggctggctgcatctctggcccccagctggggactctccatgtggagtttgcatatctctagcaagagcaaactgactacttcccttctccttgggcagctctttaatgcagaacggccttccatgtaacacttttttttttcttttttttttctttttttgagacagagtctcactctgtcacccaggctggagtgcggaggtgccatctcggctcactgcaacctccacctcccgggttcaagcaattctcctgtctcagcctcctgagtagctgggattacaggcacctgccaccacacccagctaatttttatatttttagtagagacaaagtttggccatgttggccaggctggtcttgaactcctgatctcaggtgatctgcccacctcggcctcccaaagtggtgggattacaggtgtgagccaccccccgccccccggccacactttggtttcttacttgagctctccacagtgagaaagagttgaaggggaaagaaaaaggtgctgtcaaagtagctgagacggaagccaagcgcaaaaaagtcaatattagctttgcagtcatcttattccactaaatttgttttaaactaagatattagtttacaagttctctccagaaatgacagactatttattcttccatggaaggcaagccgtttgaaaggttttttaaaaagcaaggataaaagaacaatctaatgtgccagaatacaaggctaaaatgatttttttttctagaaaaacaaaagatcccaatgtatttatagtgtatagctaatggatataagaaaatcttttcaggaaaattaatgacaatgtgaagagtcattccttcatttgaaaactgggttagcttcctgaagggagggagagaggctttcacgcttttggttcactgagagccaagctggctgggaccaccaaagccgtcccaccaacccttctgatgaagagactgtggtctcagtggcaactgccattgattgagagcctcccaccttccaggtgttttacatgaacttgctcatttagttcaacagctctgcccagaggcttcagtgcccctactttgtgggggtggggtgtgagaatgtctcactttagaagctgagattctaagaacaactcaggtgcagcagactccctgagccttgctctgtgtatccagctgtgtgtacatcacagacaggacttgacgtgacttctctcccatcatgggctccatgctccaggccgcttgagctaagcccacttccattctggaaagttttgggctgggagctgatggcaggagacgcaggaggaggcaaagaagggcagacacgtgggctgctcagactgtgatcacaggccaccaggagaggggcttggggacagtccttgtgaaacctccctgcgaggccggcgaggccccaggggtgcattgggctccatagtccaaaggaggcatgagggtcccactgggtctctagctccccagctctggtgtccgtaggctgctcccttccaaggctccagtgtcaccctgtctgggaaactcacagctcctcaaggtccccggtccctcgcaaagggtcacatccagccctccgtgatctccttctaagacagcattatgacccgtttgtcttttctccctgccacaggacagtgggattctgcgggcttcggtgccttctccacgatgctgagggcctgagcctgctccacagccttgaatgtttaaggcatcctcgcttccagcccccgtgtggcgagaaagcagtaaaggagcagagggaaggtccggacccccacggccaaaggaggcatctgcgcagagcacacagcactggctggcacctgactcttctgtggcggccctgaggcccgcactgtgcgggaagcggcagccgaagggcccggattcaaggccggcatggactcgggagctcgtgaccttgggccagtcgctccacctctctgggattctgcactcttctctttgacaatgtgtgggtgttccccaggcaccttcagggcagcagagaaagccaagatgacagatgctggagaatgacaggaggcacggaatcgatgactttctaacacacaccacaacacacacacatacacacacacacacacacacacacacacacacacacacacacggcactgcccgcagcgcctcattattcccagatagataggatcagggggagggagccggctgctctatttttcttttaattaaataattaatttggactctgccttgttctagaaattattaaaaccaggcagccaaaaatttccagtaacatcttttcttcattaccaaagcaattcactttcaatgtagaaaattttaaaaatacagataatttttttaaaaaaaccaacccactcatcatctcctcaagtctcctgcacagcgaaatactggatgcttctgctgtttattcttctgggcttctttcccgatcctcaatatactttaagatatttacttaaaaaacatgggatcttacctggttattgttttccaactttatgctctacctaattgagtggtaaatatcttacagtatcaatcaacataaccatacatgcaaatttgcaattacaatttttagtagcgcctagtattttgttctaggaccgtgtcatacattaatcatttgtttttcatgtattggatttttctaacttttcactactgaaagtattaacattagactgaacatccttaaacagagtgtcagcagacttgaagataacagtgaaaatatcatggtttcttagtcacttcattcccttgtctcattcagatgaaaaaagaaaaacaatagtaaaccataaagaaagttcaacaaaattctggtttgtctgtgatgcctactccaatctgtttttgaaatgttgaaaatataattcttttaaaaaattgattctttcgtttcgcagatatctaaacatccttatctctttgtgcttttaacaaacaaaaggacattgctgggtcaaaggacatgcatattagtatgacttcggagacatagtggcaacctgttttccagaaatgacctatcagtttacatttcttgggggtgaactgtcttctccacactctctttgtcaacccgttaggcaaaaagtgtctcctctttgtttcgtgtgcattctattcattcatgagtttgaatactttttttcatccattaattggctatttgtacttactggaagaatagttggttcttattctatcctatttatttatttatttatttatttatagatggagtttcactcctgttgcccaggctggagtgcagcggcacaatcttggctcactgcagcctctacctcccaagttcaagcgattctcctgtctcaggctcctgagtagctgggatcacaggtgcccgccaccacgcctggctaattttttgtatttttagtagagacggggttttgtcatgttggctaggctggtctctaactcctggcctcaagtgatctgcccgccttgacctcccaaagtgctgggattacaggcgtgagccactgcgcctgacctcccatttatttttttacagggctgtctttctcttgttgtctgtcagaattctctgtattttaaggatattaaaccctgtttttgtaatttgtcacagctattttcccagatgtaatttaccttttgtgtttttattcatgttttttaaaaatttatgggtaaaatattttttataatcctatttcccaatatgttactttattgatttttcctttggtgttatgctttaaaagtttttcttactacaagtttacataaaattttacttctttttcctctcagtactcttatgttttaaaaaatatgtaaatcatatgcaaattatcaccacatgttatgaggagggaatctcacttttttttccagatagctaattattccaaatccatttatcaaatggttcattcttcctcacttaattggaacagcatctttagctcatcctcattacttatacacgatcagggatgtagctgtgctttttatacctatctattgtttctaagatagtatcattttatttatattttcttttaaaatatgttttaatatctggaaaaacaaatacccatctttatttttttctttttaaaaaactaaccagtttcacacattctgccaaattaactttaaaatcattatcaagttccagaaatgattttattgggatagagactgtaattgtaatgaatatatatagttagtttgggttgaataaacatatttacaatgttaaactttcccaaacgctgttgtgtctactttatgaagtagatttttaagaaatttaaaaattattattcaataaagtttttagatctctgcttctagattctgtagacttttttttaacccctcaataccttatatttttgtgagcagaatcttttctttctgttttcttaacagtcacacaaataattgctagtctcttgtatttctcctccatgaggacagggactcgggtctataggccatttaagatcatctttttccccattaatgtcaaaactaagagttctgatagaaggttttttatagactcaaatttgtctgaagcttctggggatttggagaacaccctctcggaatctctcagtacccctagatgtgacagcaaaacacagctgtcctgagcatccttcactcgtttcccggtgccgacagttggcactcacttctctttggtttttccttaaaggaagacccagacaccccggccccactctaggatgttcagactgaaagctcccagatggtctgttttacacttctgagcatgtatcatggctaccgaggattttgtgacaatggtcacaaaattaggactccataaaataaatacctgattgggaccaccaggaaaccaaactcatctggcggttctcaaccctgactgaattaaaaaaaaaaaaaaagaatcatctttggaaattttaaatactaccaatgccttggagatgctgtcaatctgtctgggattgggcatcagtacatttcaacccctggtcccctccactcccttggaatttgattctgatgtgcagccagggctaagacccacttctttaaatggtgcccaacggattcatcaaatgcttatttatatgcaacagaaacaaattatagatgatttaagcaataaaggggtttatttaaatgatatttaaatagatatctttggcctttgggagagccgaagaaccagccttgatgtctacattccagtaccagttccgcacatcacaccatagaactgacacagcgatgacacactgcctgctgctgggcttacacacccagagacacaactgggttttgggagccattctaacggaaaaataaaaatcataaacagaaaattaggcaccaaagtaaatattcatcatgagaaaaaaaccccaatttaatatcattaaagttaaatatttacaccttatctaaaccaaatgacctcccaaagccccatatagtcatcacgaaatttagaaatactacataatattttaattttttgcctgacaccactctacaacagattttttctctctctctttccttctttctccctttctctctctctctctctctctctctctttcctctctctctctctctcttttctttcttttttgagacagagacttgctctgtcgcccaggctggagtgcagtggtgcgatcttggttcattgcaacctccgcctcccaggttcaagtgattctcctgtctcagcctcccaagtagttgggattacaggcacacgccaccatgcccggctactttttgtatttttagtagagacagggtttcaccataatggtcaggctggtctcaaactcctgacctcaggagatccacctgcctcagcctcccaaagtagtggaaatacaggcatgagccactgtgcccggcctcaatgtatttttcaattttgctcttggctgtgtcttagtcagcttgggctgctataacaaaatgtcatagacgaggtggataaaacaacagacatttatttctcccaattctggaggctgggagtcaaaattagggtatcaggttggtcaagctttgcccctcacaacctcgtctacaccaagttacttttcgaatgcccacttacaaatatagtcacaacagggggttagcttcgatatataaatttggggaggagaaacagtcaataataggctatgtaagaatatggttataaaatgtaattttataatattttctgtagaaagaatagataatttggtctttcttttagcatggtttatccaaatttcttttttaagtaatctttttaatatagaatagttttatacttacaaaaagttgtgaagatagtacaaagagttctttcatatttcttacccagtttcctctgttgtatatttgttacaatgaatgaaccaatattgataaattattattaactaaattccatattttatttacatctccttagatgttttctcatctctttttctgtcccaggatctcattcaagataacatactacatttaatcatcctatctccttagcctcctccagactgtgccagtttctcagactttctatgtttttgatgaccttgaccgttttgaggagtgctggtcaggtattttgtagaacgtccctccatttgggtttgtctgacatttttctcttggttagactggggttatgggcctttgggaggaaggccacagaggcaaaatgccattttcatcccatcatattatatgctgtcactgataatgtcaatcttgatcatctgtccgagatccaaatttgttttacattaattatgatttagaaaagtctcctttaacttcatacccactatgggcattgtcatgtaaagttataggattgttgttaaatttggaacagcttctatcaagtttcatctgcaatctgagcatctagaagggttttccacagactagcttctagcggcatgcattttggatcttgtttcccctccactccccacgtaattccacagcctggtactcaggacatatttatattgcaactcaatttctgtcccagaaccttcatatcatgaagtttgttaatttggcacagtggacagtagaaatttcctggcagccattctgaccccggggaggccagcagactgtagaagtaattaggaaccacagaaaaatgatgccacactgaactcaaatgaaatgtatcctaatgcatcttccccttagtttgtccccaaaaatgccacagccactccaacaccacatggcatgaaaggaagtgtgacaaatggtacgttggagtggatggagacaatgatcagccttaacaaattacagttcaaatatctcgcttttgcagcttttataaaaacatgtgaacacatttctggaacaccctcctaggccttggaagaggcttgttatagtaaggcacctccaaatttaagtcattagattaaccattaatctggctctgcaaatgccttagtgtatgctgcagacccccccgaccctgaacccaagatgctgcagcttgaaacactagcgctgctgtctctggaaatcagatatggctgctgctgccctagagaatattcttcactatgtctgcttcggtttgtcaccacctttcaattcaaagtctggggagggtgtttggcattggttgagcctaaatcttatgccttcgccctagctgcggggggaggctgggaatgtatctgttaatttgagcttatagagtgaagacaagttctgccttctagtgtggcagccctcaaatcaaagcagaaagtttattgtttgtagttgcattaaaaaaaagcatgaaatgatataaaaggaactgatgaaagtagttacctgtgggggagggtagtgggaggagattaggagccagacttcttaatgtgagcattttcctatcattttgagttttaaaacgtgtgcatatattatctagtcaaaaattaaaaattttaagggtgatataatcatattaacaaatgtcacaaatctaagtaacttctctcttaaataaacattctgagcaaggattaaaaacattatactactaagtgcactgctacacttccatctgtgttatttaatgccaccaaatccatcaggccaatttgctttcctctcttctctgcctattttggcatcctcccaaatggctcattttcacaacatccccatgaattggcagtgattagccttactggtagggggagaaatggtatggatttcccatacaatgcaaaataccgtgactcactttcttgtcgggagatttcagaacagttcctcacacacaaaggaggcttttcagaaccaaacactgcattaggtgctgagctaaagtgaagccagtgaagatttgctcattgtccagagatgaatccttagggtttgtgaagttctggggaaggaggcaggggagatcaccatccaaggagtggagtggaagatttcataaagtgcttctggagcaatcctagtctatcagaaagaccaaggagtcctctctgagaaaagaaagcccttgatcgggaagataaagaaaggacccagctagaagtgatgttcaaaatatttaaccacttttatgggatggacctgaccaatcagaacctgacaggtttcaaagcttcagagaagtctagaatccctggtgaccaagagaaagtgatcaggaatagcgccgagaaagctggaaacacacctgatacgaaagtcatggttggagtctgttctggttaggaggtagagagacaactgcatcctaagtactaattcactatttattacagaggttgtgttggctacagtctctgctaaagtcttcctccatctctctctccctccctccctctctttctctttctttctttccttcttttctttctttctttccttccttctttcctttcttttctttttttttgacagggtctcccaggctggagtgcagtggtgcagtcttggctcactgcaacctccacctcccaggttcaagcgattctcctgcttcagccttcccaagcaaccgggattacaggtgtaagctacagtgcccagataattttttgtatttttagtagagatggggtttcgccatgtggccaggctggtctcgaactcctggcctcaagtgatccacccgcctcggcctcccaaagtgctgggattacaggcttgagccaccacacccagccctgaagtctttctagaaggattctccatcttatttttgtcctagagatactcaatactcagtaatctcatcctgatccaatatggcctaccctgaggaatggaggaagagcttggttctggattggactcttctggcaaggcaggcatgacagcagaccttgctattcacgagtttacgaataatcttgaggaaccttgagctcacctgtggtcactccttcttcccaccccaaggagaagagaagcttgtcttcttggatgcagttgggagcctacagcctactcccacacccaggcctctgtggctgtccaaagtccacgtgtccccaagaccatcctcacttggggaggacgtcggcatattatgggttcagtcattctaggtataactatcttctgtatgaccaggtcaagctatatatagcttagaaattttcaggtgctcgattagtaatcacaaccaatgtgattcaagcatctatctgcttggattttttaaaaaagtgttttcagtcttcccagtcctggatattttaagcagaaggacccatccaagcatcataggataagcacccaaatcagaacaagctcctggtatctcagtaatgagaagctcctttctcattactgcccatcttccctgaccagactgagcctttatcccctgtaatgatcctgagattgccccttggatacaaggacagtttcattttggtctgatattctgccacagatttgatcctctgatctgccctgggaatagatctccctgatcaagaaggactcctgtgcagtaaataattcaccttgtccaaaagaggtttgacttttgccctcagcacatgagaggtaacttctaagcccttgaaatgtttctgaggcaggagaatgttgtgaacccaggagacggagcttgcagtgagctgagatcacgccactgcacttcagcctatacggtagagtgagactccgtctcaaaaaaaaaaaaaaaaaaagagaatgcctttgtttatatggggggcttgggatagcccaaagggtctatgttatcaatgtgatttatggtggggactttgaaccacacagtatcaacctgacctctggaagtgctggtgaccaaggtcagcccagcagatggtcaatcatgtctacgtgaacaagtcccaataaaaactgtgcacaccaagactctggtgagtttttcctggttaataatactctgtgcatgatgtcaaatgttgtgtctgagaggtgctctctgcacgactcatgtttaatgacttctaaaatctgacctatatgcctcttcccttggaggattttaatctgtatcctttcatggtaataaagcataaccatgaatataataacttttctgagttctgtgcatcttgctagcaaattattgaatctgagatggtcctggggatcttcaatttgttgttggtgtcagaagtgaggaggatcttgtagacacccgaactttgcaaccttcaaagtagaatcccagcatcaactcacctggccagaactcccatgaaaagcgattagcaatcttcatcctagaacctggggacattctgtttttccttcttttctggtcaatcggtctcttctcagccactgcactcttagaacagtctgacctcctagtttccctttggagcctttcctacctcatccccaaaccaggttaaaccctcccacctgctgtttatcctcttctagagatatctcccttttctgcatcattaccttctcttatcaggcacataccccaggttcatacctgcccaaatgaggtcctccttctgtcagtcaattcctgaattatcaaagctcaccacatcttctgagctggcatttccatatgatatcagtctgctgaaaataaattccaatatacagacacaaggagatccagttaaaagagcccaggaaattctctatttattacagaatgacaagtagaggtcttgacgtaaacgcagaaaagcaggaggccccggaatctcacagaaagaaataacatgagaactgggaaggacagttctgaagctttcataagacaaatccatcaaacacaagagagaaaattagatttcctattctgctttttcaatagtgatccaattaatacttgaatacttgaatacttctaagcccttgaaatgtttctgaggcaggagaatggtgtgaacccaggaggcggagcttgcagtgagctgagatcacgccactgcacttcagcctatacagtagagcgagactccgtctcaaaaaaaaaaaaaaaaaagaatgcctttgtttacatggggggcttgggatagcccaaagggtctatgttatcaatgtgatttatggtggggactttgaaccacacagtatcaacctgacctctggaagtgctggtgactggggcaataaaaacacagtaatttggatcaattggtaaagagctcaatatgagttaatgaaagttagaattgcagaatatagtggaagaaacacaataaaattacttccaaatatttacatagatttttaaaaaacaagcaaccaagtagaagtcttatgggtcgattatagtaagtagacaattttcatgtgccagttcacattattttaatccaatcagtgctactcaagtgctttaataatgtgaaaaatagtttccattcttaatcagatcaaatattttccttccaaggcatctgagattgtgtttagtaaatttgtataaatagtaattctcatctctcatgaaggcaaatttgagggaggaggtgggatgggaggaaggcctaagttaataaggaattacttgattagaatgagttggcatattacagatctataaaatcgagagggcttgtttttcatggataaaagtagattcatactaacaaatgtgtggtccaagaaagtactattaatacttcatttcgtttatttatgtattcattcacacattgatttgttcagcaaacatttctttaagacttatttcaggccccatatttggttttggtgatcaaagatatgcaaaacactatttctgccctcaaggtatttgcagtccactaggactcttcaaatgaccacaattccatgtggcaaatagctcctggtgggttctcagagagcacggagtgaaggacactccccttcttcctgagtgtagagttcaatatttcccagcctcctctgaggttacatgtggccacatgactcacttctcccagtggcatgtagacagaagtcatgtctacctctgctgggtctaggcttaggagatgggcatacctcctgcctcttttccccttgtaactggggcagaatatagtccaacattgaccatagatgaggacaatgccattgggtctagaggatgatgcagcaaagacttgacaacctggaagaaattgagtccctgcccacaagcctggcactcttgaatgggcagatggaacagaactgcccacgaacctggcccactcactttagaactgttacttgagggggaggagaaacagctataattttaaaaccactttatgatggggtctttttattcatttttattatgaaaatgttcacacatatagaaaagctaaaaaaaattgtacaatagacatttatatatccacagcttaaattataccattaaaattttactgcactttcctttttaaaattatagacctacctatttttccacccatctattcactcatcagtccttcttaatttttgaacaaaattcaaagtatattgcagacctctctacatttcaacctaaatactttggcatgcaaattattaactagactttttcttctgatgaaaaaacttacatacaatgaaatgcataaatcttaagtgtgtagttgttaagctttgacaaatattacacccacataacccaaaccactatcaagatcaagatcattcaatttccccagaatttctattagggtatttctgttacagcagcttagctttaccttaaatcatatacagagtcataatattaataatagttagaagagctgaacatcttttatgtgtcagggattatataatgcatattttatttttcacaataaagtcatggtgtaggtatgattagctctgtcatattgataagaaaaattaggtttaagaaattgcccatgttcactcagctagtaagtggcagagatgagctctgcatctagatcccactgattataacacctggcatctttccactactctctttgactgactctgcctgagggcttcagggggagcttagctgcacaaaggaagaatatttaagctacatcttgagcctcaaccctggaagattgagctgaatccacttatcagaaggacaaagcagggaagggctttccatgcagaagaaacatcacatccaaagcaaagaaggatgagagtgtagcatttgaacaattgctgatgtctccatctgctcagagcttagagtaataatgtaggggaagcagaagatgagagttaaaaactgaccaagatactaatgctttgctaagtggattggatttgatcctacaggcagtgaagagccatcaaaaggatttaagcagggaagtgacgtaattagatttgcaatttacaatgcaacttagaatgctgttgatgcagaaaaatggtatcagaaagagacaggggctaaggaaaccaatgatgaaacaggtgaagtagtccttcggcttgaggatccaaatagagcagttactatggagaccatgagcacaagctggaagacaggtcagctggtgattcccactttcaggacaagcttccattttttctgtatgtgctctagttaagaaatctttaaaggctaggtgcggtggctcacgcctgtaatcccagcacttcgggaggccaaggcaggtggatcatgaggtcaggagatccagaccagcctggccaatatggtgaaaccccacctctactaaaaatacaaaaattagccgggtgtggtggcatgcacctgtagtcccagctactcaggaggctgaggcaggagaatcacttgaacccgggagatggaggttgcagtgagccgtgactgtgccactgcactccagcctgggcgacagagtaagattccgtctcaaaaaaaaaagaaaagaaatcttttccatttattatagtggtggggactgctattgcctcccacaatatctttcactcccttctatagtaataaaagtttcagcttgatcaatccagtcaaaaactaagttatccagcctctcttggggctaaatatgactaattgtatggccaggttcaagcccactgggatgtgaggaaaacagtgtgtgcaatttctagggtgttcctataaaaggaaaggggcatacactgcattccttcctcttccctctctcctgggctgggatgtggaggtggtggagagtcacctttgatcatttgttcaagaagaagcctgtacagatggtaaggcaacaagatgataagagcctgggtccacacagagttcacctgcgaccctgggcctcctgccaggactttttcaaagggaagaaacctttatctcatttaagccattgtattatggaaaaattttgttacagaagtccaacgtgtagcaataaaattcttcagagtagtaaaggagatggaatctctcatgcaggttctgacctggatggctccctaagtgtaagacatggtgggagactttgtggcaagaatagctgtcctgggacttagaaagatcgggatttgtacaccagcatgccactggctaaatggcctcgagcgtattagtttacctctctggacctgtgagttttttcttgttgctgtttctttgtttccttctataggatggggaaaatggtagtgctattacaaaaagtcgagatggtatttacaaaagtctgcaccttagtccctggcacatggtgggcctccatagtggcagccattgtcattatgaataactctgggtgaagttggcaggggcagctagctcaccagggaggggcatcccaggaacttgagcatatagatgcacttctctctccaatctgcatcatacttgctctttgatttttcaacgctttttttttttttttttttttttgtcgacagagtctccctctgtcaccaggctggagtgcagtggcacgatcttgggtcactgtaacctccacctcctaggttcaagcaattctcctgcctcagcctcccgagtagctgggactacaggcacgcgccaccatgcccagcttatttttgtatttttagtaaagatggcgtttcaagatgttggccaggatggtcttgatctcttgacctcatgatccgcctgcctcagcctcccaaagtgctgattataggcatgagccactgcatccggcctcaatgcttttatttctttttgccgtctccataagagagtaggatttgtactcctctcttatgagtctcacgttttaattgcagtcttgttcctagcaagataggctatcttggacaagatcaatgaggtttgtgatcatctgaacattcaggagttctgcgagaccaatagccctggtttggagttcttcagtttggaaactgagctgcttcctcagtcagatttattgcacatgtcaagaagcaattgactccataccagcttcttttcacccttgtaagggccatggttcaaactgatgggactgttcttatcaatcccgcaaccctgactaatcgggggaaacttcttgactcataagctacaaggaagaaaaagggaaacaaagttttccaggaggccaatgggtgaatgtcttttccttctgggaagtgttgctctgtattcctgctctagaaaaaatcaccttggtaagtaagagttcttcctctctttaactttctgtaaacagaccttagaccagtgaatttcatgctcacagtatatcagagtcacctggaaagcttttgagaaaactcagatccctgcaccctattggccaagaaattgagactcgattgatctgtggaggggctcaggaaatggtattttgagagaaggactcaagtcagtttttatagacagtatttttcatagagtgcatgggcttcatccttggttgacagtttttatggtgattggcactcaaacaacatttctgatggacagaatgggactcccatgccttgccctagcatctggaaagctcagagctcctgctccatgagcgctgctgctgcacctccacctgcacccccacttcactaatgtggagggatttccaacctattttagaagcagaggcctattaatgtgaaggccactgagtagccttgaagtcagagtttccatccagatgaacgtctaaaaattttcaacctgagattattttcctgaccacaagaagaaggaagacataatttttatggttgacttgagagaggcagactgcctgccccaccctctcctctccttccaaactgatctttgtttttggtgtcatttggctcttggtgggaggaggggggaggaaactctttcccaggcgagaatataagcaccccatctcttgcaaggagcaagtgcattttggaagaagagcctccttcccctccagggaagactgtgggaatgtgagcccctatctttttttttttttttttttggtaattcctgtggtctttgatttattctccgattctaatagacaaccaaggactctggaattggctgcaaaatcaactgtgggagaggagatgagagcttttgtgtagagaggtagaagtggaagaagccagaaggaagggagttgaagagattccaaacacatggccactccaaagctgcagggcactgtcctagtgtccactagccactctgcagcaagggtcatggtcagctgactgctccagctgcatgggatgcgaatggtccatcaactgcccatgcccttgctcagggctcacactcttctgtcacctccctacaagtggggtcttcactgagcaccattcttgtggctacaaacccccaagaggggaggtgatgactgaccaggatctcccagctccatgatggggtcagcttcttcaaagtccccagctctcattccaagaaaactgtaagattgaagatagtcagaatacctggtatccaggttccctagggctgccatggcaaaggtaccacaacctggggggcttagaccaacagaagtctactgcctcctggttctggaggccagaaggccaaaatcaagttgtcaggagggccatggactctctgaaacctgtaggggaagggtccttccctgcctcttccagcttttggtagctccagacattggcttgcagcagcctcaccctaatctctgtctccatgcttacgtggctttctccctgcacctctgtgtcttttaaaaagaaaaacagtcatattggatgaggagcccactctgctccaggatgatctcaccttaactaattgcatttgcagtgacccaatttccaaataaggtcacattctaagatattgagggttagggcttcaaataccattttttggcaggcaggatgtagtagcctgttttcacgccgctgataaagacgtacttgagactggacaatttacaaaagaaagaggtttaatggacttacagttccatgtgggtggggaagcctcaccatcatggcgggaggcaaggaggagcaagcaatgtcttacatggatggcagcaggcaaagagagagaacttgtgcacggaaactaccccttataaagccatcagatttcatgagacttattcactatcatgagaacagcacgggaaagatctgccccatgattcaattacctcccaccaggtccctcccacaacatgtgggaattcaagatgagatttgggtggggacagagccaaaccatgtcagagggaggcacaatttaacccagaacacttgggatgatgaggagtatgaattggaaatgcctgagccccctaaactgggctaaggagacaatccctccctctctcctacccttcctcctctccctcccttttttcccttcctcccttcctctgctccctcccttccttccttcccctcttccttccttccctccctcccttccttccttcccttaccccttcctcttatcctttccctttcttctttccctccctctctcctgtcccctctcttccttctttccattactcctgcccccatgtcctcttccccttcatctgtccatctccttagaagtctgccagtgaggtgcacagatgaggaatgtcaggctgcccaggatggcatcagccagctgactgcttgcaagtggctccatgggccctagagaagggaggaggccagcctcctcaatctgaatgcccttctgctttatgagccttgcctctgctgccatttttagcagcagcttaacttgcagggatactgccctggtcctcagctgccatcccagacctgcaggcgatgcctgggcgctccctccctgctgtcacaggacactcaccacccgctgatagccagcctgcttttttgacattgtgaggcatctgcctggacagccaaggacaatgctgcagtttctgtggaaacctgagtgcctgtaaggactctagtggggactctaacccaccattgggcaggctctgggagaggctagagaatggtggtcaaccacctgagtgaggtctgtctgatctgtgacccgagggatgtcactcactctggagcaaggggccctctctgggcctcagcttgcttctccagtgagaaattgccaagcctggccacctgcctgaaatgagggtaagaggagacagaagcagcacgaacacaaactaacacttaaagggattatcttgtcagttgcatgggactttcttttgctgtccatggagatagctgtaggaagagggatggaaaggcggaggagggagtggggcctgattctttgatgtagagagaggtacaagaagaagtagaaggcttggtttcgataagaggcattttagatttggccatcccaggggcccagatgatgcagtagtggaggaagccaatcttggactccctcttctcctcaattcttccctgggtcatggtgcagctcaggacctctgaaggctttggctgctctccgtggaagactttgggaccagtcagcacatggcctattggcagattcacaaagggcatctcccatctcactctgctgtgcaagtaaatggttatgaagccttcagaggtgccacagagaggccccagggctgaagaccatgcatgaactcttttagcatggaaaaacactcacgaaggcagttattagttatagcaccctatttagagactttataagacacaatttttgttttatcaatttgtaggaacatagatcatttactgtttgctgactatggttctcccatgaggacctctctctctcatgcttccttcttcctagtagttatagaaccactcagactacatttcccagtttccccagtgcctaaccatggtcatgtgactaaattccagcaaatgggatgctatggaagtgacgtgtgtatagctgccagggaagctgcttgccctccacatcttttatcaaggctagaaggtgaacttggggtaatgaaccagtcctaatgaggatgtaaccaaagggaacggtagaacagtgaaatgaaaggaagttggatccctgtatgacctgccagatcagagcagctgccctccatcctctctcccgaaactgccctgttcagctcaaactttaaaggagagaaaaatgaacattccatcttgtttaagtcactcttattttcatctctgctaaagcaactgaaccaacatatacaaactggatcaataagtaatttgcgctgtgattttgcttactatcatgcacatatattggtgtccaaaaaacatgagtgtgaaatcttgtcaaaagtttgctcacatgttacctgttttttcctgccaaccaacaccacacaccactttctcataaaggtcttcttagatccaggaagctaacccagaaccctttaaaaatgatcatattctctggccgggcgcggtggctcacgcctgtagtcccagcactttgggaggccgaggcgggtggatcacgaggtcaggagatcgagaccatcctggctaacaaggtgaaaccccgtatctactaaaaatgcaaaaaattagccgggcgcggtggtgggcgcctgtagtcccagctactcgggaggctgaggcaggagaatggcgtgaacccgggaagcagagcttgcagtgagccgagattgcgccactgcagtccgcagtccggcctgggcgacagagcgagactccgtctcaaaaaaaaaaacaaacaaacaaaaaaaaaacaaacaaaaaaaaaaacacatcatattctcaaacagctaatagaaaggtcaattcagagtgatttaccttcagagagggaccctcagagagaaccttgttttggggagttgtaagaagccctgtaggctctatgaccttatatctcagatttttaggacaattctaatttaaactattctggctcagttcccacaaatgtatttgtaagtgtacttgccatggtttttgttgagaaatgtggtcgcagtccctacgggcccctcagctgattgtcatcccttcgtgtcatcttgccctctggtcttcctcctgccaactcaggaaggtctaaactcaggggacagaggactgctccctctgagctgctccccccgagctgcttcctctgagctgctccctccgagctgctccctctggccccctctctgacggactttttctattctaggaactgtaccgcactcattcgtagggaagcttttttttttttttttttttttccttttggagaagttaagcttctttagagattaaagttggtttcctctagcttccttacaaactcacagtgttaaaactgggtcatagagacatagttgttccattttctaaccagacaatagcttcaggcagtgccagagttcccctcctctctgccccctttctggagccccaggaagccgctgagcaagtccctcctgctgggagtggacagacctcctttgcacctgccctcctccctgggccaagggcacttgcccttgtcaccagcttaagctgtcgccttttcctttgtctctaatttatgctactggcctccagggggctcccctctgctcccgcttccctctccttccctcctccccctaggatgcattctaaacaagggcaaggacattttttggggtcatggggctaggggtggaatttttgtctgtcctcaagggcttaatgcgttgagactgtcatagatggtatcatcattcaaaaatattttccggcccttcctgaaggagaggatagttccctaccccctgccccccactgacatcagatttgacattgtgacttgctcttgccaagaaatgcaagcagaagtgatgtgacacatgtcacttccaggaaaaagctttaagagctagtgtgtggtttgctgtgtgtcttttctctcttccacaagatggacaatggtccagaaaggggctgcttcatcagcctggatcccaaagaagataacatgaagcagggatatagttgacccatgacagatgggcagcttgagcaagaaataaacctctctgactgtaagtcattgcaggttgggcatgttgttattgtagcataatctaatctgtcctgactattttagaacatacatagaaatgatctcacactctttttctatgaagctatggtgagttgggcttgggttggacatgcaaggagactgctgcatcatgagaatatagtgtggatagattagtctacctctgctctaggctttagaaagaaccccaccactccccgccccctactccactctcttttctggccctggaatgaccttaatgttatctgtttccatatgtacctgtgtgttagtctgttttcacgctgctgataaagacatacctgagactgggtaatttataaggaaaaagaggtttaatggactcacagttccacgtggctggggaggcctcacaatcatggcagaaggagaaaggcacgtcttccatggcagcagactacagagaacgagagccaagcaaaagtggaaactccttataaaaccatcagatcttgtgtgatttattcactaccatgagaacaggatgagggaaaccactcccatgattcaattatctccacctagttgctcccacatgtgagaattatgggagctacaattcaagatgagatttggttgaagacacagccaaaccatatcagcctatttttatccctggtccaccttaaggcaggatgcagtctctcttcccaggcaccagaaagaggccattgcattagaagaactgatgataaatattgattttactgaagatctcacagggaagatagaatgtttatatcatatcctcaatgccaactgcccatgcatgtctgtagcagttctccatgatacaatgagctctggagccaaaatacttaggttcgaatctcagctttaccacttagtgtgtgatcctgagcaagtgaattaaattctatgtctgagttttctcttctgcaaattggagacaatgatgcttcctgtctactagggttgttattctcggtctctgacaagcatgaaagttcgactcgaactaacctcttcttggtaactttattctttacctgtcttctccgcatgaccagagatacctctgtaaaatgaggttgagcaggaatatcaagcctgccacacagcaaatacatagtaaatgttagtcatcatcataatcattatcatcactgttatttcagctattaacaatcttcaccagatatgcttgcttttctaagtcccttcctccccattatgctattggtggctgtgactttttttttcttttcttttcttttcttttttttttttttttgagacagagtctcactgtgtcacccaggctggagtgcagcggtgtgatctcggctgactgcaacctctgcctccagggttcaagcaattctcctgcctcagcctcccaagtagctgggactacaagcacacgccaccactccaggctaatttttctattgttagtagagatggggtttcaccatattggccaggctggtctcgaactcctgaccatgaggttttggtcggcctcccaaagtgctgggattacaggtgtgagccactgtacccggcctgtgccttgcctttcatttgatcttctcctgtgtcgtgtccagcctcatggtctcctgtccctccccttctgaactgaagcttccccaccacaattgagtcccttgtgtatctgggatctggcgttcatgccctcctctctctcttccctcctacactccccctccaccaccccaaccacaagcccacatatctctagctctcaaccatcctaccttggagacattacttgcagagaatagcctgcaatgctgtgaagttccctcccagggagaaagaggtcatcttgagaacttatatcccacagcccccagtctcccatgctgggaccttctcacctcttctgtcctggcaagcagccaagtgtggctcagaggctgagcagagggaaagatgttggccctttgctcctcagcatcagtgggcttaagtgcgggcacaatccagacctggagtgtttgcatttgaaggcttagttctactcgaatgaaactctggttcaaggccttccaggccaatgaaaaattccagccaactgagaccaagcaaatgtggctgtatccacatattcagagccaggccttgggcagggcaggtgacaaggagcatgtcatttgggggaacctagcactgagtgaaatcatcacagttaattctttactagctgtgtcagaatttcggctcattttaatcttggtgttcaatgaacaccctgaggtcttcctcatgagtcccctgcattctgatgaaattgcctttagtgtcttaggaggccgtgtggttcagagcatgggtgtggagttgagagatgtccattccactccaggtttcaccctaaaaagcagtgtgaggtggaacgagttattctgaggctcaattttttcatctataaaatgatcattattattatcaccgtcaccatcataatcatcaattgccctgccccctgcctcacagtcttactagggttcaacaggataagctatgtaaaatgttcggcccagggcctgggacctgtttttcctgcttctgctgttgttattgttactattattattgtttcaggtcacctggccctccagggcctctttgtaactcttataaaatgatctctgacactctgagcctgtttttatttggaatcttaggggaaaaaagcatttgtgaggtccaggatttaatcttgtttgtcctcggggcatgtggctattaacaagggttgtttacggagggtctgtccatcctgctgagcttgtgtgatcctcacagtggccctgcaaggtcagcattattatttccatttcatgaatgaagaagaggcccagggaggttgaaacacttgctcaaattcacacatccagaaaggagcaggattggagtaggaacctgtgtctgattcattttgcaaacacttttctagcactttctatgctcctagcactgtttcaagtactttttaaataagaattaattgatgtcatcctcttaacaaccctatgaggtaggtgccgtgactgcccccttgtgtagatgaggaaactaaggcacaaagaggttaagccacttgcccaaagtcacacaggtttgcatggcagtgacaaattcacttcggcagcctggccccagctgcccctcaaggctgttctttcccatacacgtcactgtctctcacaggggtcccgctttttcagtgggtacataagcctgccttcctggcacagacatagacccccttccctggtccccttcgagcctcttaaaaggggagccgctgttctgcattcatcctccatgaccgtggcctcttctgcttcctcctcagaagccagtgggtttgttctgcaaattgctagtcagaggaggccaggcattgtttaggctgctggtggtgagggtcagtgccagctactggaccagagccagacctgcccccgtgccaaacccaccgcagggaggcctgctgcacctcctcctgggaggtctccctagggcatcacctgagagcatgcaaaacaaaagccacacaaccaaaccatttttccaaggagggcctgcttgcccaacacagtaaaatccaactcctattggcctgtattccagtagatgcattcagtgtgtcccttggcaaaataatgtggtaattgctgtaagagactgcccgctgccttccccagtggatgctctatccttcaccagtgctcatgagcatttgtggaggggtcctcttccatggccagccaacagccccacttctgcaccctggctcataccattcagagtctgcaccctggactgacttagactagcaaaagattttaatcaactggttccatctccccagcccacacggatatctggggactcctaaaaacaccatctctgcctgaagaaatttccctagcatctgctaaagcaggctagcaaagaggaatgggggcttactccatcttttaacaaattgacttattaggaagcgttctcacatcctgagtcaaatctactgtattaaaattttctcccattctcttcgtgcatgttctggagtaacaagatcaagactgctttctcctctacatgacagccctttaatatttaaaagcagctgttctttttcttcagtctctaattccctaggctaaatatatccagttcttccatctgttattccaacaggatggttcagaattcctcaccattcgggctgtcctgataggagaactctcaagattgccaatatcccctttaaaatgaggccccaggaactgaacccactgtcagagctgactgtcatctgagttccctgggcgtgagctgcatttattttccttaagagccaggttgcccggttggctcactccaatctgctcttctcacataagctgctgctggttatgtttctcccacattctaaacttggacaagagagtttttagatctaaatgcaggcttttatattgatgactatttaaaatcctcttaatcccttttaaaggaaattctagtcaaattcaacatgttcccatatcaacggcattattctatcttttccacttcatattatcttcaaatctaaaaaaaaatttcccttcacacatttgcccaagaaaaatattgaaaaattctgccagagcacctgggttacccactgaagagaattctccagaagaaggtcaactgaagagatggcctgccatgctaatcataaacaaattctaagcagatggcttggaaattcgttagaaaatggatgatgtgatcaccatcagtcaatcagctggttaattcaaccagctattaatactctgaataacattccatctcacccacaaacgtatcatggtagactttgtcaaatgcctcatggaaatcaaatcatgtcaaggatcagtctcctgactttaaaaactaatacccttgactgggcgtggtggctcacgcctataacccccacactttgggaggctgaggtgggcagattgcttcaggtcaggagttcgagaccagcttggccaacatggtgaaaccccatttctactaaaaatacaaaaattagacaggcatggtggtggcgcacctgtagtcccagctactcgggaggctgaggcaggagaattgcttgaacccgggaggcggaggttgcagtgagccaagatcgtgccattgcactccagcctgggtgacagagtgagtctccgtccccccctcaaagaaaaatcaaaaacaaaactaatacccttaaaaaacaacaacaacaaatgatgttggtttgtttttaaaaaacacatgctgattcctagtgatcatttatccacaaaccatctgtttcctactcaagtccaatgggagtattttatccccttgccccattgattgagtcagagatgggcatgactcaagccagaagaatcagagtcaatccagaaacttgtactggaactatttggaaagaatcttctttccactgaaattgctaaggttggaggatataagcctggggatgtcaagagccatcacatgagatggctgagaagggagtcaatagagaagctagcagagaaactggctgggatgctactaagtcctcatggtgatatctgacacctgatctaaatgtgcctgaaaatagaacccccatttggatttttcagttacaggagccaataattcccccatttttgccaagcctcaatctttttgaaatttgcatctaggccattttttcaacccctgccccaaatatatccatagctgtccctctaagcacggcttcagcttccacaagctccaatatgtcacaacttcattaatttttagttcagtatattttctaatgtccatggggatttcttattagacccatggattatttagaagggtgctgcttaatttccaagcatctagggcttttctagatatcttttgttattatttccagggctcaccggtctgtaaatatatgcacaggatctcatttcccttgaggtcttcctcagtgaggattctgcggactccacatgggtatcttccttatggttcctcatgtgatcatgacagagttcatctcctcagtgccaccttggtcccaccacatccttctcagattttcagtatagtgtggtatttgctatctcccttggaagcaaggcctctggagccctctaaatgtaaagctgcacctcatttaatagtggagggagaagaatgtccttagtagacatatttagtttgtccatccagcagctcttccttggaggaactatgcttcctctcttccatatagttctagtgggtttgtcaatcactgtaaagcccctccccaccacacatgcagaaatgggcatgtgactcaaaatggccaatcagagttttccttaggaattttctgcccagctatcaaagaagactgtctttttcaactgcaaggttatgtgtggagggtttctaggggccaccgtcacagcccatcagaaaggtctgcagaagaaataaagtcaaattgagacaagcaaagctgagaaacaaaaggtaagatagaaaagaaacctgctaacattgttagagccttccatccactggaaacttgaacctctcctatgctttccactttcatgaacttgcaagtttccctttggcttgttttaacttgggcagtggtctgtcacataaatccaaaagagccctatattgcttgtaaagggttgaatggtggccccccaaaatgtatgtctatgttctaatccccagaacctctgaatgcgtccttatttggaaaaagggtatttgcagatggaattaagttaagcatctggagatgagatcatcctgaattacctgagttgaccctaagtccaatggcaagtatccttataagagacacacaggagagacaggggaagacggccgggtgaagatggaggcagagactggagttatgcagccacaagcctaggaacactggcatctgtcaagttggaaggggcaaagaacaatatctcccttagagcctcctgagggagtgcagctctgccgacaccttgactcctggcctccagaactatgagagaacaaatttctattgtttgaagcccccaagtctgtgggaatttgtcagcagcctcaggaaactaacacgttgttccacttttgtatcagctgaggggagggttatttggccctgatgtcttctgaggcagactggtacctgtccgtggcctgttatgaaccagggctgcacagcaggaagtgagcagtgggtgagcaagtgaagcttcatctgtatttacagccactcttcatcactcacatcactgcctgagctctgcttcctgtcagattagcagcattagattctcacgggagcacgaaccctattgtgaactgtgcatgcgagggatttaggttgcacgctccttatgagaatctaatgcctgatgatctgtcactgtctcccatcacccccagatgaaaccgtctagtttcaggaaaacaagctcaagctcccattgattctacattatgacgagttgtgtaattgtttcattatatattacaatgtactaatattagaaataaagtgcgcaataaatataaggcacttgaatcatcctgaaaccattcgcccccaacccctggtccatggaaaaattgtcttccatgaaaccagtccctggtgccaaaaaggttggggactgctgttctaaggcttcagataataaagacggatacgggacataccacgctatattccagattccctatccgctctgacaaccagtttcctagctggcttggtgtgggcatgcctaccacgttcttcactcagaatgagttatctcctgggagatatcacaatccccttacaaatggactcctgatgagtccatcacctgtcacacacacacactttgccatagggtaatgttaatatctcaagcattagagtcagtgaggccaaaattagaattctacatctgctaattcctgtgagacagtggagacaaattggtttacatttccaggtcccaactttctcagcttgcaaattaggaatctctagctcacagggtattataaatgttaggtaatccacacaaagcacagagcagtccatggtccatcttctcagcaaatgcaagctagggtatgttgctagatatttttaaaacctggctttgggcttttttcagatattgagcagcaatatgttcaggaaaggtgtacgaagcttcattggggtgagtcatgatttgcaaaggatggtttaggattgggcataggatctcgtttgggccaatgagatgagaggggaaatttttgctgggcttttctggggaaaaatgattttaaaaaattagacacacaaagagacacccactcagactttgtgttttggacgctgtgatgtgaagatacagtgcatagagtgctggcagccatcctgtggccatgaggcaaaagcccagaaaatttcagtgagcagtcatagagccttgatatcaataagctgctaaattcaccgattctgcaaatctaggcctccagaactcttaatgtgtgaggtcataaactccgaatgtctatgccacttttgcagctgatagcctcctgaaatgttcctcaaggactttgtgtgttgtacagttgtttttgttagtgatgcagtgtttttaggctaagcgagtgtattagtctgttctcacgctgctaataaagacatactcgagactggatactttataaagaaaaagaggtttaatggactcacagttgcatgaggctgggaggcctcacaatcatggtggaaggtgaaaggcacatcttacatgacagcaggcaagacagaatgagagccaagcaaaaagggtttccctttataaaaccatcagatctcgtgagacttattccccaccatgagaacagtgtcggggaaaccatcctaatgattcaattatctcccactgggtccctcccacaacacgtggaaattataggagctacagttcaagatgagatttgggtggggatgcagccaaaccatatcagtgagcaacaccttaaagtggtttcatgacacctattaccatttatgattctctcctcagtgtaaaaccaaataaagtttcatcctcagggttctgccttctgttgcaacattttcacatcacctggggaaaaacaccctttttaaccaaatttatttgccccacaaatctcaacacatgggtgatcaatgtcagcattggaaatgtttttcacattaaaattcaagcacaacatttgctccatctggggacagagtgagcaggtaaacaactttgaaaactatgtaccatgtgagatacaggggcttgggtgtctggaccctgaatcctgttcagctctgacagtgagctttgtttcatttgttttcactctcccctacattagttctcttgaacagcggccaggttcttccttcctcctctcagcaacaggcaggcctccctgaaagagctcaagatccaggctgcggggtgactaatagtcactaatttaaagaggagaatcctcttgctctttggtgcataaattctgtctactctgcctaatgcaatcactaaggggtcactctccctgcctcctaggaaaacacaaggaatatgttctactagagtaacagttaacccttaacagccacatcgaatattaagagggtttaaactaaaggatgctacggcacaaatgccaacttttcagagaacccttcccttgaccacataattacaaaagaactctgatcattctctggttccttacctgacccttttctgaagtcacatttaccaaagtataatttatatacagtaacattcaccctttaggtgtacagttctctcttagtgttgggcagctatgcagaccccactgcaatccatctggagaacttcctgtacaccaaaatgttcccttgcaccccttggtagagaatcccttcctccattctaagtccttaaaaaccaccgatctgatctctgtccctctgctattgccttttcctgaatgtcacataaaaggaatcacatggtatgtagcctttgtgaattgcttctttcacttagcacagtgcttttgagattcatctgtgccgtgtgtatccacggttcattccatttagtgctgggtagtattcttttacatggtgataccatagcgtgtttaactgttcatgtattgaaaagcattttaattgcttccagttttggttttgtttcctaataatgattgtttccaagctgctatgaagaatcatgtacaggtttttgtgctcatacatttttatttatttgggagaaatgcccaagagtgcaactgccaagtcatagggtaaatgtttgttttttttccaaaaattgccaaactatattccaaagtggctgactactttatgttaattttaataaagaccaatttattgataatttattttatggatcaagcttttgatgtcatgtccaagagctctacctaagcctaggtcacagatatcttctcccacgtactcttctaaaagttttaggctgggcttggtggctcatgcctgtaatcccagcacgttgagagggggaagcaggcggatcacctgaggtcaggagttcgagacaagcctggccaacatggtgaaacctgtctctactaaaaatacaaaaaattagtccgatgtggtggcacacgcctgtaatcccagttactcaggaggctaaggcaggagaatcgcttgaacccggaaggtggaggttgcagtgagcccagtgagccgagatcacgcgactgcattccacccggggtgacacagcaagattccatctcaaaaacaaatacaattaaattaaaacggttttaaaatattacactttacacttagatctatgattcattttgagttaattttttgtatgtgatgtttaggttgatgttcttttttttttcttataaatgtccagttgtttaaaaaccattcattctcttttctccattgaattgcctatgcatctttatcaaaaatcatttggctggcatgcacctttagtcccagctacttgggaggctgaggtggaagaactgattgaacccaggaggcagaggttgaagtgagctgagatcgcgccactgcactccagcctgggtgacagagtgagattctgtctcaaaaaaaaaaaaaaaaaaaaatcaagtggccatcctagcaagttattttgtggatatagacaaactgattccaaagttttaataaagaagcaaaagatccagaatatccaactgaatagtgaagaacaaaaacaaagttgggtgacggatactactcaccttcaagacttcctataaagctacagtaatcaagacagtgtggtactggtgaaagaataaacaaataaatcaatgggacataacagagagcctagaaatagatacatgcccatatcatcaactgatctttgacaaaggagcaaaggcaagacaatgaagcaaagtcagccttttcaacagctggtgctggaacagctggacatccacatgcaaaaaaaaaaactgaatctaggcccagatcttacagtcttcccaaaagttaactcaaaatatatcacagatctaaatgttaaatgcaaaactataaaactcctagaaggtaacagaggagaaaatctagatgatcgtgggtttgatgatgactttttagatgcaaaatggaacacatgatctacgaaaaaactaactgttaagctggactttaataaaactaatcattcctgctctgcaaaagacactgtcaagaaaatgaaacgataagccacaggatggggaaaatatttgcaaaagacctatctgacaaaggattgttaactgaaatatacaaagaactcctaaaattcaacaaaaacaaaaaaaaaacctgatttaatgagatatacagatgacaaataagcacataaaaagatgctccacttcatagtcgtcaggaaaatgcaaattaaaacaacaatgagctactactacacagtccagaacactgacaataccaaatgctgctgaggatgtggaacaaaacgacctctcattcattgccggtgagaatgcaaaatggcacatccactttggaagacagtttggcagtgtcttataaaactaaacgtacttttaccctatgatctagcaattgtacagcaagtgtacgagggttgcttcaaaagacattgccttttgaaaagacatgttgaaaattatgtccatgtaaaaacctgcacgcaaatgtttatagcagttttattcataattgccaaaacttggaagcaaccaagatgtccttcagtaagtgaatggataagcaaactgtggtacatctggacaatgggatattatttagcactaaaaagacacatctatcaagtcatgaaaagacacggaggagccatagatgcgtatcactaagtaaagaagccgatctgaaaaggctgcatattctatgattccaactacatgacgtctggaaaaggcaaaactatggagataatgaaaagatgagtggttgccaggagttgtgggggaggaagaaatcaataggtgaagcacagggggctcggggggcagtgaaactaccctgtatgattctgtaatggcagatacatgtcaccttacatttgtccaaacccacagaatgttactgtaaacctacaatactcataacgaaccctaatgtaaactacggactttgggtggttatgatgcgtcaatgtgggtttgtcaatttaacaaatgtactactctgatgggggatgttgataatggggaaggctatgtatgttagaatgttgggggcatgtgggaaatctctgtaccttttgctcaatattgctgtgaacctaaatctgctctaaaaaataaagtctatgaaaagaaaatcacttggtcatatttacatgggcctatttctggactctgtgttctgttccattgatctatatgctcatctcttcaccaataccacagcattatttctctaaatttgtatttctttttaaaaattgtttttgctattcaagttccttttgcttgccatataaattttagagtccaagttacaaaaaatcctcctgtgatttggatggaaagtgtgttaattctataggtgaatttaaagagaattgacatctttgctatgtgaaggctttcaatccatgaacatagtttatctttatttatttgcttcttctttgatttttgctaccaggatttttttttttttttttgtaactctcaacataaagactctgtgcaacttttgttaagtttctgttgtagtattttattttgtggaggaggagctattgtaaattttcttgacttttaaatttcagtttccaattgtacattgctaggatatagaaatatgattgatttttgtgtgtgttgaccttgtatcccacaaccttactaagctcggttaatttttctaggttattaatagattccttggggtcttctatgtagacaatcatggtgtctgctagtagggatggttttctctcttactttccaatctgggtgtgtattatttcgtttcttgcctcactgcactgcctagagcccccaaaataatgttgaataggagtagtaagagaggacaaccttgttctcaaccttaggggaaaagcatcccctttcatcattaagtgtaatgttagctgtaggtttttgtaaataccacttaccaggtaaaagaaggactcttctggctgggtgcagtggctcacgcctgtaatcccaacacttttggaggcccaggcaggcggatcatgacttcaggagctccagaccagcctggccaacatggtgaaatcccatctctactaaaaatacaaaattagccaggtgtgggggcacgcacctgtaatcccagctgcttgggaggctgaggcaggagaattgcttgaacccgggaggtggaggttgcattgagccaagatcatgccactgcactccagcctgggagacagagtgagactccatctcaaaaaaaataaaataaaataaaaaaagaagtactcttctttacctagtttgacaagcttttaaaaaagtcattgatgcatttcaaatattatcaaatggttctcctacataaattgatattatcatgtggtttttcttctttagattattcatatgatggagtattttggctgattttttaaaaatatttcaatgtcatgatctttagtttattattgctgtgaatacaatatctttgtattctctggggatataaaacatatttattctaaagttctattcctactgtaataatgctctgtctttgggtataagtaagtttttttttaattttgtttttttcctttccatcttttattttatgttcaggggatacatgtgcaggtttgtcacatgggtaaattacatgtcatgggcgtttgctgtacagattattttcacacccaggtaatgagcttgacttcctaggataaacccacttggttgtagtatattattctttttctgtattattgtattcaatttgttaatatctcaagataatttttgtatttatgttcatgaaagatactggattttagggtttttttgtaacatttttgtctggatttggtatcagagtaatgctaggaggttttctctcttgttcctttattttccttcagaacatttacatatcggcctctctccataggaatataagctccatgagggcggaggtctcctctcttttgctcattgttctagcctaagtgtccagaaccatgcatggacacagtaagcaatcaataaatatttgttgctgaataaataaatgtcctctgcctcagccaagcaaaaagaaaaagaaagaaactaaaagggaaaagagccaggaggatctaccaggagggcttttgcttgaatggaacttggaaatgtgatgatataaaaatgatattgaagacagtgtgcatcaataacggaaggggaaagactgctttggagtcaaactgcctgggtttggatcctatctctaccactgcccagctgtgtgtccttggacaaattgattagcctcttgaagtttccatctcctcttctgcaaagtggagataatgataatacctgcatagcagggttgagataggtgatgatgtatgcaaggtccctggcagtgagccagcactcaacaggtggaagatatagtagcaataatagtaggttctttattgaatggctgctagcaatctcttctacaaccagaagtggatctgagctgagaatgatctggagcaccctggagggaactatacctagctgcttaatactcttgagagctaagaaagattttattcttcttcagttgaccccaggtaagacagcaaaagtcactagaaaaatctgagctaagttattgacaaccatatcttctctcaggccctatctctgacaattgacccacgttccagcttcttggacctcacccagacccacttcttcagtagcctgtcaggcaactgggagagcaaactgctgccttcctgcaaaagggagcaaaaccaggctcagagaccctcaataagaatgcctgcgtttttcaggtgaaaactgaaaaagggttgggaaactaagaaatctgagccacatatttggtcatagttatcctccagctctgctggaagtcaaatgcctaagagagaagacctggaacaagactaagtcagaccgttcttctagccttggatctgaaatggatgtggttgaaggaagagcagtggcctagagggagaatgcaggagacagggaatccataaatccactggcagcattgtgtgaaacattaagcccaggtccatctcatgctgatcctcatggaaaccccagaggccgggctgagttccttagccacactatgctgccaccagctttcacggggacaccccctctcagccctctacctcactggatcctgatacccagcatggtgtgaacccctctgccacacacagcacacacttgtttgccattttgccaaccagcatgggcaaagccaactagagagcagagtgttaaatggtcattgcccttttggttagactgaaacatcaaaatgacttctctgaatacatttggctctaatgtaactactatttcccatgagcaaaatcacaagtaaaagtcaacatcacaccaggactttttaatttccaaaggtgtttatttttcctccgaggacaagcagtagctttttattttgtttaattacatacacaggaggaaaaaaagaaactagagatcacttgaggtttctgtgagaaacagggctttctcccatctaaaatgtaggttgcattcctggcttgacatttatgctctctgagtttgaaacaagaaccttgggaaattattgtccatttgatgaagagccaggcttccaagctttgggagtagctgctgattcactggaatgggcatacttgctgctcatggtctgggaaacagagataaaactggggttgacctactgtgctgtttttggggcagccgaaatcaccgtctgctctaactcagtctttcttctgatgcatacatgttagaccagactcctaggtcctagcccaacttgttacaaggaagatatgtttttcttcgtgtcaatacacctttccctggttgattattttagactgggccgggcgtggtggctcacacttgtaatcctagcactttgggaggccaaggcaggtggatcacctgaggtcaggagttccagaccagcctgaacaacatggtgaaaccctatccctactaaatacaaaaaattagccaggtgtggtggcgggtgcctgtaatcccagctactccggaggctgaggcaggagaatcacttgaaccggggagacagaggttgcagtgagccgagattgcgccattgcactccagcctgggcaacaagagccaaagtctgtctcaaaaataataataataataataataacaataattttagactggacacaggaacttttgactctgactcttacagaggagactacataaataaaggtattgtaaacaagtattttggaggattgcatgtgatttcataattttccccttatgttttaacattatattacattctatcacatctaaaactataaaatcagatggcttcccattaccctcagcaatgggaagatcttttctaagcaatggaacttgttttcctcaagtgaaactttacacggatctcaaatgtataaaacagatagaattggagcttaaactaaactcttcagaagtcacagaggagagattggaaccttggctgattcagacattgcttaatctccgctaaaggaagaactaaacatgtggcaagatgggaagctttagttgagcctagttgctaccatgtttaaatgattagaaggccagagagcaaggaggaaggtgggctgggagcgtggccaatgcattcccggccgaagaccccaccccccacccctacccaacacgtggaagatccttcgtgaagctacatgcccgcttctgggttttggtcatcctgtggagaagaggaggggcccggacacatttgcacatgtggttccaatgactgaaaacccatccaagccgaatgagctgagtttcccagaacagctgctgccctccttttcagtcgagaaatccttctctgcctcctgtgaggaagggaagcaggctctatagaaaatgtgctctcaataatgtttgcccatcaaatgaaaacacgacaatccctgtgttcaggagaatgagaacaactcacagtgaagttgagattctgttcaaacaaagtacttccttccccacttggccagagcaaactatcattttggaacccatcacactctctaagaaagacaagatgtctcactcccagcaaagatttgagtacaggcttatgggggggggccctacagagtcagttaacctttccggacctgagtcctctcccctgtcaaactaagcacagggttgggctcaaacatttcagaatttccaataacagaaaccaaggctcagtctgcagatgctttaaagcacttagctttaagacgttcagagaatgagctcacattcaaaaaactacagaactgaaaagaaccatggatgttcctgtattcaaaatccctacatcaggttgatggtctttcctatgtgtcaccttggcaggctgtagtatccaacggtttaatccaacactgccctaggtgttgctgcgaaggtgttttgtggatgtgattaacatctacaatcagatgacctaaaataatggagactatccttgataatatgagtgggcttcatctaatctgttgaagactttaagagaaaaacaggttttccagagaagaaagtctgcctcgagactgtgacatagaaactttacctgagtttccagcctgctggcctgccctagagacttcagacttgccatcaccacagtggcatgcaggagccaatttcctaaaataaaatctctctcccgctctgtctctctccctctctttctctctctctctctctatatatatatcatatatataatatacattatattattatatataataatatatgtgtgtgtatgttatctatcatctatcatctacctacctaccatctataattctatctacctatacatctattatctatctatctatctacctatcatctatctagccatctatcatctatctacctattgtctgtctatctatctatctatctatctatctatctatctatctatctatctacaatcctattgcttctgtttctctggagaaccttgactgatataccaggactcttcaaggcaaatagtctgagatcatattattcctaagaaacagaggcaagaccagggtccaaatctccttggactcattccatgttctttcaccaggatgcacagcttttcaactaccctgctataacctaaaaatacaacttaaaaggaacctcattttctgaaagaattaagagataattccagctgagcagcatttttcaccctgacccataggaatgaaaacgctgtagtttgcaacctgaaatacacatatatacagaggcacatttagcatgttaacaaaacaaaaaattcctgaaataagacttttcagatgtaatgcatttgataacttctatgttactctcttttccttcattttttgaaaatgctagtcatagccattaaattacttatgtgagcctaaattgcccactgtggcgggtgcctctggtgctcataacccatctgtgagccacctctgatttcagtcacagtggtggtagactcccatgtgagttcagattcactttattcatagcgtctcccctgaggcatgctgtacacatcgttctgctttgagctccagggtcttgtggtagctcctatggctcccacacaagtatagcctgagagtgtgggagagttaatgttctacggggcagtcctcatccagtggggagagcagttggtgtagagtggcccagcctcccacccttctagcagcccatctggggaggtgttctgtacactcctcaggaggacttggagagctgagctccatgctcatggcagtgaccttggtaatgcacctgcttcctccctgctggttcctgggatcacctctcgatcaatgagctgccccaagtctatgccccaggcttcactttcaagaaaatctgaaccaagacccagcatccctgtcactgagggaactttctacaaccccccttcagatggtcaccagtatttgctagaatctccagggatgacaggagtttgtatacctcaattaagtcttaccattgctggacaaaagagggggacaggaaaagggagcctggaggtaaccagggccttccacgggttaagcactgctctagtttattttttcactttcattgtcgagaagtagtttctctttttaaaacaggccaatttttttttataagagctttatcgagatatttatgtactatgcaacttacccatggtaagtgttcaatccagtggttttaagaagtagttaagtagtttatttttttaagttaaaaacagacattattttttataacagcttttttttgttttgttttgagacagagtctcactctttggctcaggctggagtgcagtcgtgcaatttcagctcattataacctctgcctcctgagttcaagtgattctcttgcctcagcttcccgagtagctgggactacaggtgcgcaccaccatgtgcagctaatttttgtatttttagaagagacggggtttcactgttggccaggctggtctcaaactctgacctcgtgatttacccgtctcggcctcccaaagtgctgggattacaggtgtaagtcaccacacccggcctttataatggctttattgagaaatttacatactatacaattcattcatgtaaagtgttcaattcaatagtttttttaatacagtcacagagttgtgcaaccattgccccaattttagaatgtcctcattacaccgaaaagaaaccccatacccgttaacagtcactccccatttccctccacacctgagccctaggcaaccactaatctacttttctgtctctatggatttgcctatcctggatatttcacataaatggaatcatgctacatgtggatttttgtgattggcttcttttgcttagtataacattttcaaggttcatctgtgttgcagcatgtcctgtaagacaatgccaccttagtcatttttgctagatcttctgggtaacttgctgcagcttctccatcagcacttgctgctttacctcctacttttatgttatagagatggcttctttccttaaacttcatgaatcaacttctgttggcttcacacttttcttctgcagcttcctcacctctcatagacttcatagaatttaagagagttagggccttgctctgaattaggctttggcttaagggaatgttgtggttagtttgatcttctatccagaccattaaaactttcttcatatcagcaataaggctgtctctctctctcttttttaatcatttgtgtgttcactggagtagcacttttaatttccttaatgaacttttcttttgtatacacaatttgtcaaactagcacaagagatctagcttttagcccatcttggcttttgacatgctttcctaagtttaatcatttctagcttttgatgcaaagtaagagatatacaattcttcctttcactttaacacttagagcccactgttgggttattaattggcctaatttcaatatttttgtgtgtcagtgaatagggaggcccacagagagggagagagataagggaatggtttttcggtggagcagtaagaacagacacaacattcatcaattaagtttgtcatctcatataagaatggttcatggtgccctaaaacaattacaatgataacatcaaagatcactgattacataccaccataacagatataataacaatgaaaaatttgaaatattgtgagaattaccaaaatgaggacaagaaaggagaggtgaattcttccaggtcacaggagtagatggtaacagatcgagaattaggatccaggtcttacaattcctactttcttcttctttcgcatccttactgaatcatttctttctttctttctttctttttttttttttttttttttgagacagagtcttactccgttgcccagtgtggagtgcaatgatgcaatctcggctcggctcactgcaacttctgcctccggggttcaagcgattctcctgcctcagcctcctgagtagctgggactacaggcacacgccaccaccaccagctaatttttatatttttagtagagatggggtttcaccatgttgaccaggctggtctcaaactcctgacctcaagtatctgcctgccttggcctcccaaagtgctgggattataggcgtgaaccaccacatccagccctgaataatttcttaaagaacagcaatcatcccaaacacactgtcattaacctctaatgacaacttcctggcaatccaagaggagcacccctgagcactccaaattctcttttgtgtctttttttttttttttttcagtgaattggcttaatgacaggggctcttggctccttgtaaattcagttcttccagatggttctttagctcctgttttggccccgtggctaatgagttcgagatctgctgatgagaatgggagtattggagagcctctgagagaagcaaatgacgtctctgatgacgcatgacctcatcacagtgcttggtggacttaaaaaagctcttccaagtcactcagattatttcccctggtatagatctggcccaaaatatccaacagaccattcccagtgtacttttcaaggctgagattctgctaagatagtgatcttgggaaatgcagccattattacttaataagagttggtacctttgtgctttgacagacaaaatcttccctgttcattaagggtaaaaataagaatttatcaaaattattttcttagccctgacactaacactttttgctccaataattcttaaagctagagacgcacctcatttttgtgtctggagaaaagcaagcacatggatttgggaatcagaaaacccagatgatgggaaaactttcccagtccccaactgtatgatgttgagtgagtcacccaacctaattgagtttcagattcttcagctgggaaacagcaattgtaataataatagctatgtcacaggctgatattacatgtagcaaaggaataatttaaatcaaaaataaaaacattaaatgtcttccaacttgcttgttgggaaaggttgatcaaaaaagatgagcaaatggagaaaaccaggcacccagatcttgaggaaccagccccagccaattctgccttgtctgcgtgtaatctatgtctactgcaaaacacttcttccttagacctcagatgccatgaaaattcacttcaggattgattttgtgctttcagattttgcacataaggaaacagtggagcagggactaatggctcaaaattgcacagcaaatcagctgggaaacatatgtggatccacccacctcccgagtgctttcccatctgaatctcaaggcctcaggatgtcatgtgatctttcttggtagaccagctggatttccatttgtctctgggctcaggattttgtatcatttttgacaggcactccagggtccttttgagcgcaggtatgtttttaaatatactccttttaaaaagcaagctcatgaatccaatcatttatcaagggtggcaaaaaaaaaaaaaaaaagctgactcaatttaacatatcaaaagaaacagagtttcccctcccaccttttaggcaacttaaaatctatcagactggctgggcacggtggctcacacctgtaatcccagcactttgggaggccaaggcgggtggatcacaaggtcaggagactgagaccatcctggccaacatggtgaaaccccgtctctactaaaatacaaaaaattagctgggtgtggtggtacgtgcctgtaagcccagctactcgggaggctgaggtaggggaatcacttgaaccctggaggcagaggttgcagtgagatgagatcatgctactgcacttcagcctggtgacagagcgagacgccatctcaaaaaaaaaaaaaaaaaaatctattggaccaaaaccacaaaggtttttctagaatgctgcagaacaatgcaatttcaccttatgagcttctttctcgtcatctgtcctccccaagcctttctcagttaaaacagacatgtgggatttaagactttgccccaaagagaaaaaagacagaatcaagcaaaaacggactgaagggaaattagatttttcagagaagtgagaaaaccagggtggcccatgcagaacaagctctctgctgtcacgggcttgttaatcactcgaggcacaacctctgagtgctgagcccctagttggtgccccctccatgggcactggatggtgtcctgcaggcctagcgggaagtcatcacctgggacttcccctgagcagcttctgcagcctcactctgggctgcatttaaaactttcaacctggaagataaacactaggacccaaagggattgatctggggggcctggagcaagcagacaaggtcaggggctggagggaaatgaaaccacttttgcaaaattgagactgagacagtgaatgagatctaacttaaccaaatccatcttgcttctaacctccaagctgtccttgttcattcctgggcataggctgaactaactttgggagaaacttagattatagtttataaaaacaaagatgtttaaaactgccctttaaaacaggcctttcccaaagcagacctccttcttgcctggggactaagcaagaattgcctttgtaggactaacattagccagaagattagaaattatggtttaggagtcatgcagctggaggttacaagagtctgaccctccctaaaccgctcctaagatcagtgcttgagacattttgcagacgctacacttgatggatcagctggcaccatccagattgataaactgagtcgtctgatcttgtggcctccacccaggaactcagtgcaagaagacagcttccactccctatgatttcatctctgaccaatcagcactcccagctcactagcttccccccactctccaagttgtccttaaaaagtctgctttcggaatgctcaggaagactgatttgagtaataataaaactccggtctcctgcacagctggctctgcatcaagtactttttctctgttgcaattcccctgtcttgataaattggctctgtctaggcagcaggcaaggtaaaccccttgggcagttacagaaagggcagtcagatgtggaggtctcccaccttctgctacccccaggtctaccagcagggtggaggatgggctcagaggcattggggaaagggagagagaaagatgggatgagggttgtggagagaaggaagagaggggagagagatgaaacaaacaggtacacaaagacaaaggggaaatgaaagatggaagagggaggagaaaggaatcacttgagaatcacaagttaaaagagaagtttctctcaagagctctgaaaccaaaaccacacaaacttgccttgaattcttattttctaaaattaacagcagagcttcagaaataccgtagtttctgaggagtgcagctttaaaggtatctgcattcccttcaggtccaaaggggatctgcaaaaccacctctctctccctctgtaccccagaagcagcttccgtttgcaaaagaggctgccttttatattcttttacaatgttaatatttgttttgctccattggtttgttttggcttttctaaagtgctgatgagccgccgttgtatgagttctgccgatactctagtttcaaccacaatttggaatgttagggatcggaagatgatccgaggaagggaaggggtcactgagtagaggagtataagggcgaactcttagctatcctttatgcatgaaaatttaaagtatatcaagttcagccaacactctaagctctagtcacctgctctattcaatagtcctgtcccttagagattatcttgtgtttcaagtatttgcttacttttcatgggctttatacttttggctgaaaatgttgctgcaaagatgtgggcaggattaaatgaccacatgaggtttcaaagggctcccagtaattctccactcccaaagaggctgacacctgatctttgaaagacttctgcccaagcattggatttgaggactggaaagggtatccgccttcaacctatcattttacagatcaggaaatatttacaaatcaggagcagagagagattctgtaacatattcatacccaaacagccagtccatgccatggtgaagactagatgctgagattctttggggagggaagtcagcagtcctgtgtttatgtgtcctaccacactgccctccaacaggggatggtgcttcggaagcaacctcccagaggaacatcttaagtcaaaaagatggtatcttagtgcttgaaagaagcaatgcacaatctggtcagtggagtgatgaaacctaagtgtctgggggtaagaaaaggaactgagtatcaggaagaaagtggaaatttgcagtctcaggatttggaggtccaagaacccaggacagcagggatgtgggtgagattaaaaataagatcagtgcaaggaatagctacatcgtcccagatctatgcagtgaagggactgtatccctccctaacctagacctccccagatctatgtagccaggagattgttcctccctaacctggtagaaaactgcagcagagtttactccctggagaggttgaacccaagtgcctttgacctcagagacatcaggagtacctcagagaggcatgagattctgtactaagaacaagggaattaggtgaaggctggcatgctctttgtccattcttgagctcccaaacactagatccagacttataccccaacccagtcagaaaaacaccctttgccagcaagactaaactgtcttgtctagtgggaaaggcctacaggtactgacacttagctatccgtagcgaaatgacagggttcctggccaatctcccaggaccaggtctaccagtcaatggtggacattccatacatgacagagattttactctcaatgcagttctgtgctttgctttaaaaaaattatttgtattgaggtgaaattcaagtaacataaaagcaatcattttaaagtgaacaatcagtggtatttagcacattctcaatgctgtgcaaccaccacctctatctaggtccaagacattcatcactctggaaggaaacccctgtgcttcaccttccactgtgggcaaccgggagtcaccaaacattagaggaaaagcttctgacatgaatgacaaacgaaaaagacaacagacaggaggaatgcaaaggaaacagagagcgagaagagcagaatgaaaattaaaaagcaaaacttctgaaacttctcagaaagatgagaagtcattgaatatttgaaacagaaaactggtgcttcaacagtgttggggggatatatctgtaaaatgtatagaatgagaaagagctcttagaaattcaaagtatgagcatggaaattaaaataatcttacagaaaagattttttttaaaaatggaagacttagaagttgaaaagatcacccagaaagtaggcaagtaatgtaaataggaaagacaagacaagacaattagaatctatgagtcagtctaaaaatgtcaacattgaataacaggagttgtagaaagaaagaaagaacagagaacatagaaagatgttattaaagaacaaatacaggaaaaacttcctaaactgaacacattagtctccacattaaaagggctgcctgagtttccagcacaaagaatgaaaaaagagactaacaccaaggctcactgtaagattttagaagagctggcacaggaaaatatcttaaaatttcctggaggaaaaaaacataggccacatattgaggatttgaaatcagaatgacatcaaacttctcaatagtaataatggaatctggaaaacaatggagcaatgcttttgaaactttgagtgaaaatgatgtctaaactaaaatttttaccagccaatctagcaatcagtcgtggtggtagaataaagttattttcagacatttatgaactccatttattaatatgctccaccaaaacaaggaagcaaattttttttttttttttttttttgaaatggagtctcgctctgtcacccagactggagtgccgtggcgcgatctcggctcactgcaagctccacctcctgggttcacgccattctcctgcctcagcctcccgagtagctgggactacaggcgcccaccatcacgcccagctaatttttttatatttttagtagagacggggtttcatcgtgttaaccaggatggtctcgatctcctgacctcgtgatctgcccccctcggcctcccaaagtgctgggattacaggcatgagccaccgcgcctggccctggaagcaaatttttaaaacaagatgatatgaagtcaaggaaataaaggattcaacatggggctgggcgcggtgactcacatctgtaatcccagcactttaggaggccgaggcagatggatcacttgaggtcaggagtttgagaccagcctggctaatgtggtgaaacgccatctctactaaaaatacaaaaattagccaggcattgtggcacacgcctgtagtcccagctactcaggaggctgaggcatgagaattgcttgaacccaggaggtggaggttgcagtgagctgagatcacaccactgcattccagcctgggcaacagaatgagatgccatatttaaaaaaaaaaaaaaaaaaggatttaacatgggaaagaggtaaaaggaatccctagagtttctagggtaatgaaagggaatcctaagatgagtaaagggaagtgacagaattgcaatctggaatctttccagaggcaagtccaaaaatggtccaggagagacgtagctaagacaaaaatggaagttgacatgctggtattcaaaggaattttaagatctggtagacgccatgaattaacgtaaatacaaagaaaattaagcaaatagaaaaatgaggccattattaattctaggaaaacaaaagctctgcatgagaaagaaaaggaagcatggtcaactacatggttcagaagtatttacgtggtcaaaatagtacaacatctggatattgattttttttaatttttaatttttgtgggtacatggtaggtgtataggttgatggggtacatgaaatgttttgatacaggcctggaatgcataatgatcccatcatggagaatggggtatccatcccctcaagcattatctttgcattacaaacatccaattatactcttttagttattttaaaacgtacaagtaagttattattgactacagtcaccctgctgtgctatcaaatagcgggtcttattcattctttctatttcttatagcctgattactgatttgatcaaacattgttgtataactatatcagaaggctccgaaggcagaggaagtgtgggtgagcactgggggagtgagtctggtataaaagtatccagagtgaagaaatcaagaaatggtaatatacacatgttattgagaaacccagaggtaaagaccataagaagcgtttaaaaagacttggagccaggcacggtggcttgtgcctgtaatcccagtactttgggaggccaaagcaggaggactgtttgggcccaggagttcaagaccagcccgggcaacatggtgaaaccctgtctctgcaaaaaatacaaaagaattagccaggtggcacatgcctgaagtaccagctacttagaaggctgaggttggaggatcacctgagccaaggaggttgaggctgcagtgagctgtgatcgcaccactgcattccagcctggggtgacagacaagactctatctcaaaaaaaaaaaaaaaaaaaaagacttggcagtgtttgcctcaatggaggaggaattagctgggggaggagtgggtcagaagactgctatttcagtatcaaccttttaatactgtttggctttttaaactaggtccataaatatctttgatagaaatgtagattaattttttaaactccgttactgtaacaacttggcccatcaaccaagctacaacaaatgaagttatacccagtggcatgtgatggtcctccctgctatagcaagtggttcacagaggagaaacgctactcgctgtcaagtcccatttctgaaagaagtgacctctttttcaaccctgagaaaatgcagccactaaatacaagtcaaatctggttaccatcaaaatccaagtgatgtgtaaccaaaatatttgtaagccccaggtaatggcctagttatcccagtataatgtgttgtaacagcatcttcaaatactaaaaaatgtatagtagttgctttcactctgggctcctatagcatcctactgcccttaccaatgggtaatttatcacatttttattgtactttattgttgggattttcaaagtgtttgttaaatcgtctgtcttcatgaggacaaagaccataactagttaattttgtttaatcccctgtgtccaacacagtaactaatatatagaaggcatgaaggaaatgttcgatatataaagaaagaaaagactaaatgaatttaaaacaaataaataaagcagcatccaagataatcaatgcatactgaaagtttagagtgaagaggaccaaaacgaaggggctgttaagagtgacaaacactgcaaaatctggggaataacaagaatggctgactcttacacagtgtttgctatgtgccagcatggttctgggagaggcatgggtaagagctcaattaattctcataataaccatgatgcaggctatcactattcccattttatagagaagtaaataattggccccaaatcacacagtcctcaagcaacagaggggccatgcttaggacccaggccacctggctccagagtctgtgctcataagcacttcacatgaaggactgaagtcctcagaagcaaaggcctaagggatatggcccagggagctgacttggctgggtacattcagccagtttggactcgttaagaaagttctaaaggagaagaggtcttcagtagagaataagagcttgtagggtgagagctacctggaacctttagattgggagcaaggccttacctcaggttcctcagctgtgtaggaggagggctacccttttcctccaagttgttgagctgggtaagggcagagccagttgatgggagagagtgcccaggcacaactgggtgtgaaccaaaggacaaatggctatgtctggtgctcttaggcaaaggctgattgtccaaggttcttgttctctctggacccaggagagaagagcaagaagaccaatcaagtgaaaataaaagctggttcctgagaatttctgcagaaaactgagagtgagaggacccaaggaagccctgattggagaaataacagaatcaatgctgtgggctgaatgtttgtgccttcccaaaatttatttattgaaacctaatgcccaatgtgatggggttaggagatgggacatttgggaggtgactaggttatgagagcaaatccttcatttgttccctttaaaaaagactctagagattttgtgccccttctgccatgtgaggacacagtgagacagccgtctgtaaacaaggaggtgggcacttgccagaccctgaatttgctgggccttgatcttggacttcccagcctctagagctatcagaaataaatttctgttatgtataagccacccagtttatggtaacctgttacagcagcccaagctgtctaagacaaccaaggaggtacaattcataaggaaacagattttccacatggttgctgtgggccaaggttgacagaacagaatctcttgggtccttccatgatgccagggcactgtggtctcccgaaacatgagatagaagctgagagagattgattatgaaaatgtctgctattcttcacccttccttgtatctactgctttcaatgtttctttgcagttctgatccccaaacatgtgagagagcccagccaagatcagcagagccacctccctgaccctcagccaacctcagatggatggatgagcccaggtgaaactagagggaccatccagcttacctgtagacttgcaagcaataacaatgcttgttattttatcccactgagtttctgggtggttgttatgtaggtatcatgaactgatacaggaaccatgtagaataccaggaagacaagagttgcaggacaactcagagctccccctcttcctgctccttggggaagagatatggtagggaaacagatggaccagctagctagtagaggctatcaaatgaatttaaaaaaaagaaaaaaaaaacagctactctttaatgagcacctactatgcacatggcaactttgtgaggtgggcatgggggcagcagtcaccgctagatgcctacccaatacatattctccacttcactcttccttttttactaacagaatcttatttgggagaggaaacaatgtacccatattaaaaaataatatttcgtaaactcccttgcagttagaggtggccatgtgacacagttttggccaatgagatgtgagtggatagggcttctgggaaagctctgtcagaggaaggctgtccccactgaagcataccttgtgctgtttgctctacccatttctggctcttagaaagacattgaggccagccatggtgcctcacacctgtaatcccagcactttgggaagccaaggcgggtggatcacctgaggtcaggagttccagaccagcctggccaacatggtgaaaccccatctctactaaaaatacaaaaaattagccaggcatggtggcgcatgcctgtaatcccagccaaccgggtggctgaggcaggagaattgctggaacccaggaggtgaaggctgcagtgagctcagattgtgtcactgcactctagcctaggtgacagagcaagactctgtcaaaaaaaaaaaaaaaagagaaaaagaaagaaagaaggaaaggaaggaaggaaggaaggaaagagagaaagagcgagagagtgagaaagagagagagagaaagagaaagagagaaagaaataaagaaagaaagaaagaaagaaagaaaggaagaaagaaaaagaaaaagaaagagagagaaaaagagagagaaaaagaaagagagagagaaggctggaactattacagccatcttattaccatgagggaaaagccaagagaattacagagacttacaccatgatattatttagcctctgaactaaacactaccaaatgccaaacccagatatcatgtcgcatgagggggaaaaaatcctcagtttttcacaccatactttgttggagtttttcatgacatggatccagcctatttccaagtaatacatcgaagattattttcattttacagatcagaaaaccaacacttggagaaattaaaagcttgccccgggctgccagtatattattatattaatgatctccagtgaattccacctcccagtatctatatccttctataattcaccctccctcccatattaactcagaacttgaccatgtgacttgctttggccaatgggacatcagtaaatgtaatgcaaacaaaggctttataaatgcacgtgcacttataaaggggcttccctttttggaatggtccctccctccaccatgggaagaaaccttgtcttcacatgtttctcacatgagagaccaggatgagaaaagaccacatggagaaagaggcccacctgtcccagtgattctagacattccccctgggacctgccagccctcgctgcagccacacaagtaacccctgcaaagaccggcagaggagcctcccaactgagtcccatccaaactgcagaatttttgaacaaatacatggttgttaattcaaaccacgaaacattggggtggtttgttacacaaaagtatataactgctacgcctagctaataaatggcaatagcagaacttgaatttagatctgtttgacaccaagggccacgtttgtaaccactctcctattccccaccaccatactcctgttttacttgtttagtctacacgcttcccccaggcctgaggaaagacttgcatttcccgttcagattctgtaaaatcactttcccacgttggtggcttttcctttctactctgagctctggactctaagttgacagagttcctgtcggaaaacaaagagcatctgatgccgactgaacctccagacacaatcttgctctgatctccattctcccggctccaacgccttcaacatgtgtgcagaactgagtcaatgatgtcagagaggtggaactattcccagagggcatttcattcacctaataataaaatgtgtgtgtacctctccactgccaatcccttctgcaattaaagtaggaacattttgcattcagggtgttcttgtcatgactgaagcctcaaagggctttgcaaccctgggtgaaccctcccgataccaaggcccgtatctgccaatccctgtcacccaacactcccttgagatgacctcaaggcatgtatgctgaattgaataccttttccaaaaagaacctctctgaagacatctatttaacttgcattttctatggtactagcgtggtttagttagggacatggaccctatgtgtgttgaggatttggtgtaggtttcacagtctggctgttggtactagcttcccctgtggcacctcagttcatccctgtgtggcctctcatcttccagtaggtccggccagcttccttatgtgacatccacaagaaaatgttccagctttgtaagtcagacagtgtcacttttaccacattcatttcattaaagaaagtcgcatgtttccaagagtgagaaaacagactctacttcttgagctgccaagcacctagggccatattgaatcttctatgcctgtattcaaggtgaattgttgttattgactattacttaggctgaagaatgggactgacctctttaagagtaatgctgagtcatccagtcagcctcagcccaaagacaacactccaagctgacaggcgatattgaggtcagtgcagacacacggttttagagcagagcaaaaatcacaagacaggtcaacaaagagaaagactggaggtgtaaggactgccctgaagaggcacctgagaacctttcacgggtgagaaccacaaagagaaattgaggcggctgggaggagtggggagggatgagggttgggcaagtacctaccatgtaccaggtgcatgtcacgaaggcctcacacaacccatcatcatcctcgttgcaaatcctcacactatgctagtgccagggctgttgtgctaatcactttatgcaaatgacttagttaatatcagcaacaattctgagataggtgtcactgtgtctcccatctcacaaataaaagaaaactaagtcccagagaggttaagtaactatcccgaagtcacacagctagtagccaatggagttaggttgggccattgtacagaggagaaaaatgaggctcagagagattaaataacttgccaaagaacacagaattgaactaagagtcatgcctaaatctttctgactcccaaaaacggggctctttccttaagtgcactgtgttgcctctgaagtatttgcatcatgagaaagattattccagacccttccagaaagagaagactggctgccatggaagaggcagacccagtcacccagaccttcttcatgaagcaaatttaacatgaaattaaaagtgggcatttaagaatacacttaagctatgaatacactgtatgctgcacccctaataatacaagtgaagtcagaaaaggcagtgtgtgcctggtgcttacatttcttttcttttctttctattttgatgtttaatttcttggcagtaaggagaattaactacttcctgtcttaaacaaatggggacatatttatgggaagctgtgtgtaaacacaggtagggtttcactgggaaagcctttgcagtttgattctcctgtcacccctaagctcccagctggacagtctagtctaaaaacggcactgctcacgcctgtaatcccagcactttgggaggccatggtgggcagatcagttgatgccaggagttcaagaccagcctggccaacttggcgaaaccctgtctctactaaaaatacaaaaattagtgggacgtggtggtgggtgcctgtaatcccagctacttgggaggctgaggcatgagaatcgcttgaacccaggaggtggaggttgcagtgagccaagatcacgccactgcactccagcgtggacaacagagtaagactctgtcaaaaacaaacaaacaaacaaacaaacaaacagacaaacatctccgacttccctaatgcccaagacagaaggaaggggccagtctagaaatccctactcagagtcggtccagcctgcaggcagcgagaggatttcccctggatcctgagcctatctgtgccttccttgaggcagcgttggtgggttctagacggagaagagggaacgaggaatttagtgggaaaaccaccgctctggaaggtgcccttgggaaggcagctcggaccctaatcagacctaacaaattcctgagtagaaaaagaagagacgttggcatggggtctttccagtctgtgcttggagaaacgcccacttgggttttggccatctgcctattatgttctagaaaattccacaggaccctgagggatgaggccattctgggagggagctgaaaagcaggatgtgacagcagagataagggatcctggcagggatctcctgcagacagaggggtgcagagccaccctccctgggaagagagctcgggcttcccaccttcagactgggcctcagctcatgacccattccaaagatggaaaaacttaactgattaccattttcatgaaacatctttgatttttcattgtcttagtgagcctgggttgtagtgaagcttgcagttgagacaaggatggagaacgagcactagggagaaggtggcagggctgtgttaaaaatatctgaatggccgggcgcagtggttcacgatctgtaatcccagcactttgggaggtcgaggcaggtggatcacctgagatcaggagttcaagaccagtctgaccaacaaggtaaaaccccgcctctactaaaaatacaaaaattagccaggcatggtggtgtgcacctgtaatcccagctactcaggaggctgaggcaggacagtagcgtgaacccgggaggcggaggttgcagtgagctgagattgcgccactgcactccagcctgggcgacagagcgagactccatctcaaaacaagcaaaaacaaacaaacaaacaaaacattctgtgagtgcaggggaccttgccacgcaacaggagatgctggtttgtgggccagtgtctctattagcatttccctggagtctccctttccacctgccaccatggcccccaggacatgcgggatccctggggacagtgggcagcagccacaaatcctcccagggctcctcctcgcttagctccctcctgccctccgagcctcttccttccctccccatcccctctctgagccggcatttcttccatctgcccagtccctgtctacacattattcctcttttgtgatctcaatgtaatggagtgaaattatcacataaacacaggaagagtctctgggcctcttctcctctccccacctcctctccagcatccatctccctctggcattgtctgtgtgggctgttggccacatctcactccccgctccctgcaggcacaaacccaaaagcctcacacatttcaggcctcagagggagggagcaggccatggcacatctgtccgagacctccccctgcctttcgttttgggactgttcagaccaacccacttttttcttttccccagtgcccaagggtctcaccacttaaaatcacactcagatttccacggcaagttgaagctttggcacctcaggtgtccactgaaatctcaaacaccccacagtcacccccagaggattaagtagcttcgagctcaaacttggaggatttctggagaaatggggttccagcaggtactggattcagttcagtctaacttccccggaatcatttcatccctctagaaaagacttggggttcccaaagtgtaacctggccctctggagagggcgtgagggagtgaggtgcttgtaatggcccaaacactgctgctggacttgaacttgatcatcatcaaacagtttactgctaggattctgattttcaaggagctaggagtgactcacttcattaaaagcaagcacacactatgtaccccagcttgctccggtttctacatgaccccagcatttccccagtgcctgcaggagtacctggcacatagggggcttcccaaaacgtttgttgattgaagaaatgacctcaccctctcaagaggctgccagcctcccgcagcccgcaggaaaggaatctggaagctccctgcagaggggaagttgtctgatggtcatcttttagtttgttttctctaagccttcacagtgggtactgactacattcaccgttcatattttacagagaaaaatattcatcacttccctctcagaaaatcaaacgctgctttgcatgttggagaagaagcacgatctaaaaatccccactgggtagagccaggcagagtgattcataccctctattcagaggcaagaatgacatatgtcgtgcacatgtgcccagcgccgaccaagcggccaagctggattctcagagcagcccactcagaagaacattccttatttttaccctttgccaaaaacagaaactcacaccaatgctccctcataaatagccttgccatttcagaaggctgcttcgaagtacaagatgctcagtggaactgagaccacggaagcacgactgtggtttatagaaactgaattagactcattatctaagaatgaaagcattcagcttctaaatatacagtagcatttatttctggcccaccctccgtgtttgtgtactttttatttttttttttagaaacctatacctttttaaagacactctctacagcacttgccacaaaggaccagtttctaagtgtggtttaaaatagctggtggcctctggtgcagtaaaagggaaaatcggaggagggcagcacctgagaagtgcagagacacaggtgtgtggtgatccagaggtctgggggaggatttttgttactttgaaaagcagatggagactccacagctgtaagaagagcaagaagaacaagttcttgcaaggaacatacttggtaaatataatgatgctttatatcagcacgattgtcccaagacacaggaaaaatgacaacaaaaccattccaatggctcctttgggaagaagtaactatgacgcatcaccctcttttgatttataattggggaaactgaggctaactgagatgaagcattgttcccaacgttgtgcagtagatgcgagccctaggttctggctgttttccactgattcgtcagccatgaatttcaacagttgggtgagatctggctctcatccaaaccctgtgccagcagaaatgatctttgtttgcgggcaaagaaggcaagagtaggaaggggacaatgatggtgtctgccttgaccccggtgggaagcatcactgggttgtttctcctccgtgattactcacagcctaactgcaatccattctctcctgttttgcagaggttctcatcctgagtttccccaaacagctcctattggaccaagtctagtcttacaatcccgtggtggggagaaatggccccccagagatatgcccacatcctaatccctagaacttgtggatatggccttatttggataaaaggtctttgcagatgtaattaagttaaagattttaatgaggaaatcatcctgggttatctgggtgggtcctgaatgcaacacaatgtccttacaaggcacttatacagggagggagatttgacacaaaataagaggaaaaggtgatttgaagatggaggtagagattggagtgatgcggccacaacccaagggaagccagcagcccctaaggagctgggagaggcagggaacagattatcccctaaagaccctgtagggagtgtggccctgacaacaccttgacttcagatttctggcctccaaaaccgtcagagaataaatatctcttgtttaagccacacagcatgaggtaatttgtcacgggagccacaggaaactaacatagactacatcctgtctagaattctgttagatttgcctaagggctaaattgcaactcccaaaatctgatacaatggaggcttgctttcctgttttgtcattctctcaacagttacttaggagtgcttactaggcactaacagtgagctaggtgctgggataatgatgggcaaatagacacaaaccctgatttcatgcagcttacagcaggggaaatagtcaggaagcaaataccaacaccaactgcattataatctgtaataaaggctgagaaggcagagtgcaggtggtgtgacaggtgatggcaggtaatggcctcatgtgaagaggaagagagtgagcttgagactgagccctgaggtctaataggaaaaggggctttccagttagagaaaacagcccgtagggagacccccaaagcaggaaggatgtggaagctttcaaggatcgactacaggcagaaagcaaggaagggaattttaatctctgtccttaggacatggggaagccaagtgttttatgcagaggggtggcccaatgagatgaaagtttccagcagctcagtccggctgtgaaggagatgggagtgggccaagaccagtgaggagactcttgagaagcccaagcaagagatggtggtggttttgatacgggaggggggcagggaagtgctgggtagagaagggcagggctcctggtgagggctccaccctcggtcttgtgcccatggacctaagtgataaccagcactcctgtttccacgcccaaatgttgcattgtccaagactactcctaaccacttcacccccgatcctgtgcccataaaaaccctgagaccctagcgggcacagacacaagcagctggacgttgagagaagcagaagatcacgcaacggacaccagcagacactggcaggccactgacagcaggacaacatggaattcagtcaggggcagtcagaggagagtccggctgctgagcggcccactccagggaaagaccacctttccaccccaacccccttctggatccccatccatctgctgagagctacttcctccactcaataaaaccttgcactaatcctccaagcccacgtgtgatctgatttttccagtacacgagggcaaggacccggaatacagaaaggcctctgtccttgcgataaggcagagggtctaactgagctgattaacacaagctgcctatggatggctaaactgaaagaattcactgtaacatgcccactggagtttcaggagctgtaaacattcacccctagacactgccgtggggtcagagcccaaaaacactctccacaacctgcctgtctgcatgcttcccctaggagtttgagcagcaggtcactgacaaagtgagccacacccctgtcacacaccctgtgagggggataagggaactcctcccatttcagtttgtactaggatgggaactgctgagatggggagaagtgggtggattccaaaggagttggtgatgggttggaggtgggtggtggaaaggatacaaaccgggtttctcagttgtaccacagccaggatagaagtgccagagccattgggaatattcaagaaggactcagatttgggcagagaaaacaacaagtattttcatttggaatgaccatgcatcttagttttccagggacaatccaagttaagcctatcatcccaaagtcttgtctggtttagtttagaatttgttattctcaaaaatgccctggtttggaccaatacatttaacagtcactctaggctaagatttgtgtgatttgaaaggccttggagacatctgagagaagattttgagaatctagaatgagaagagaaggagcccaggagtgaagcttcctgaactttagtatctgaggacaggcaaaggtcgccaagcaggcagggtctgagagtaaggaggccagaaatgttacgggaggtgcatgccctgtgttctagttttcctagagagccttcaaactttttctataaaaggccaaatgaacattatttggcttcccaggtcaaatggtgttggtcgctgatatgatttggctctgtttccccacccaaatctcatctcgaattgtattcctgtaattcccacatgttgtaggagggacccaatgagagataattgaatcatgggggctgtttctcccatactgttcttgagatagtgaataagtctcacgagatctgatggttttatcaggggtttctattagctctgcatccccacccgaatctcattttgaattatactcccataattcccaagtgttgtgggagggaccaggtgggagataattaataatggaggcggtttcccccatacagttctcgtgatagtaaataagtctcatgagatctgatggttttatcaggggtttctgcttttgcgttttcctccttatctctttgcctgctgccacatatgtaagacaggacttgcttctccttgccttccaccatgattgtgaggcttccccagccacatggaactgtaagtccaattaaacctctttcttttgtaaattgccccatcttgggtctgtctttatcagcagtgtgaaaatggactaatacagtttctaatacccaactatgccattggagcagctttaggcactgcataaatcaaccagtgtggctctgttccaaaaaaacttcatttacaaaaacaggtatgagctacattttgcccacagggagtagctggcagacctcactttagaataacactctgggcctctcccttctttattcctctccagtggaggtgggaaggggagcagggcattggcactgacgggttttactggagagcttaggccaccccctctttggggagctctgtctgagtgcagagagctccacactggaagtcgtagggggcgggacttctaggagggccctaaagctgttcagtgctgacagaaacagatctatgatccagcctgattctagggtgaggcattagtagtcccacttggctaagagcactaactatggtctgcaatcctagttttgtcagaaatggaagtgaaattgtgactccatctgcatgatatttttgctccaaactgggacggggaggactaggtacattgaccaccgccctggccaaccccaacagtaaaggaagtgtctatttctcagttccactgtattttgggttggatctttttgttgatgacttgccactctttcaggcaacttcagaaatagtgtagtcactgtagagtctggtagcatctattctctcttctgctaaatgaaaacacatgacggcctggttgctaagtaatacaagtaatgcatgttgatgtaaacggtggtcgagaggtggagttggggtgagacacaaatggggacatgaccttgaaggctctggagagtctcccaggtgggggtgggggctaagttccctctcgcttctgtctcgctttcagatgcccaccctcactcaaaaacatcattaggtttgcagcaattacccaaggactacacatcctttattattattattacgaaatacagacaagcaaaggagaaaataaaaaccacctttaatctccacccagagatacttattaataacggtttggcatgtatttttccagatgcaaaaatgagatcatattatccatgttgttttgtggtctgcttttggcatttaaaatataataaatatccttccctgttgcagagaagaacatacaccgtgatttttatgacacgattcatttacccagtcctctgtgattggccatttagcttgtttccaagttttcccagtaaaaacaatgctacagtgtgcattcttatagctagttctgggagcactttttgaattattttcttaaactgaattccaagaacacaagcatgattgtagaagacctcatccttctaagggagccgtgacttgaagtaggtttaagtttcctatagaggaagagcaggcttggctgtgcttacatgttgtttccagcaatctcttgacaactgccgtggtgggttatggacttagagcctcactctagaggaatccctgacctgctaggagagtataatagtgtggaatctctgctttcatctctccggggaagatgggccttgtcagttgcaatggagagaccagaaaaatgcaaagatcaagagactaggtgagtcccagccatttagaagaagatgaggtgagaataccccaaatattccctctctctgcactgcgagaagtggggagtctgaagttttctccctctttttgccatattttaaactatgtcatcagagcttggtaaggttcccttaggggccagaaatggctcattgggaggcccctcagttattcagaactcactgaagcaggggtctaggagaggggcaagcacctggctccgggcttcatggaggaaggaagtgaaccctaggacttccttctggaccatccagcccaagtcagcaggtcaggaaagagctagactcagggcagaagtcctaccaggagtaaggaacatgtctttggcttccatcttccttattattctttcagattcaaggagatgtggcaggtgggctgcagcagccacctcagagggaagggctccctaaaaaggggctggatctccacatcaactccaaaactctgcatcacctaagatgctcccacagaggttctcagccccaccatgcatccgggtcacagtgagcaaatttaaggcacaggtgcttagaccccagaggttctgacttaataggcccagggagaagcctcaatgttggtaagactttaaaaggcttcgaagccactgagtaattgctttagatggcagggaatggtgtaaaggtaactcagtgggctttggaattgactgattgatctgagggcctggataatgggaataaaaataaacaatagtatgtacctctataaagtggcttccacacagtaggtactcgaatggcaactaaacatgatgagcattaattatttgcatggctgcacgaggaaatataaaagggaatggaagaacaggtggtgggagaatacagcacagtcactcttgcttgtcaaatctgacctaagagtcttggcatcaaaagagaactggaactatttttttgcagcaaacgaaaggtaaagggctagtcttaaatgttggccctgggatccagaattcctatttgtaccaatgtgctgtgcaaatggtttacggatggagtggccatttagctttatcttgccttcctggcctgctgttagattggagggctggggtctgccttgtgttaaagattatctccctggagggaatgtaatctgctattagtatgtcttgtaggtggaggccaactgctttcccacagtctaaatctgaatcctgtttacccaccattctatttagtaacagccattggccaaggggaagagaatgaaggattccaagacaggcttaaagctttcagtctaaaatgaataggtgtttcctcctgcaggtttaggatgatctctttgtgtaactcacaaggaggctaatccaattccaggtctaaggtcgtcacatcaccgcttttaaggtcccctgaaaagtccacggtaactcaagcagtctttctcccttagatgctttatacttcaagattctggtctcttgactttttaattgatcttcacttggcacttcatacttggaacacatcagctggaaggttctttgtcccctccctgagaaattaacgatgtgtggggaaacttttagatgcaccaggggaatgctaattaaaagaggcctgctccgagaccttccgcaaaacaatcatcctttgaatacgtggctgctcaccctgccccaatctgtctgctttgtacgtttgggtttcatgtattaagagttgcttagtgtaggactcacttttgaacctccttcaggctccaagataaagccttgagctgggtctgcagggagcagtgtgagccagttagcatgtggtggtgacggccacagcctcttgctgggctctaaatcatggctaaaaccccagagctaaaagcatcacccctttctggcactttcaattgaaaaaccatgctatatttttgtttccaattatagaaggagaaaaataaaagcatctggaactcattactgtccctttattccacgccataactttaagaaagcaaaataagcactctcacaaatgcacaggaaaagagaggaagcaatgactccagaactaagccctcacaccccagaccccactcccctgtgcatctctgtgcccatattgcaaacacatggagcgtggggtttatgacggaaatcttgacagctcgccggctcacaggtctccggctcttgcaaggaggaagctcaagggagtctgcaagtcacccggctgctcaggacactggctccctctgtctggccgttcctaatgtgcaacacttgaccccagcccaagaactcaagcccaaaaaggtcaggccttctcccgaaacgtctgcgtggatggcaaggatcctggttccaggaatccaagactccagtggatgataggaagaactcaacttgcaaaaaaggcaaggtggtatctgctttcatgccacacagaagaagattgacacatgactcctgggggtcttgggacccaaacctgaactccttggcatgccacacaagggccttcctggtctgctccttgttgctgccctggaattgttatcattgtgctccctgagcacactgtcctctcccagatgataatttctttctctaaacaaaccgtgaacagccttgtccttgcccaaacagctccccagtcttcaaagcccttcctcgacccatttctatgcctttgcccatgcctgataacatagttcataaatagtgccttcgttcgaaaggcactctaaatagttactgacctctaactccatgctcagtgtagtggtggggttggggctcagaaatacaatacccccaaacatggcatcttggaaattaagaaaacagcagaagcagaaaggtcattctctggcttttttccaccttcctgtgtaagagctggccataaaggaattctctcatctacctcttctgaaagtaggtcacaagaccctatgtgacaggtgtcctgccctatacccagaggaaaggaatgctacacagacaggccaagaaggatctgaaaaaacaggccatgctaattccctttaatttattattattaggtcatacccctcttatctgatcatatttctacctaactgcccattcttcatgaaacataagcataaaaatacagttttccctgggtctttacttgttcatttctttaaaaaaaaaaaaaaaagcctttaggagactgggttttactctgtcacccaggctggagtgcagtggtgtgatcatagctcactgtagcctcaactcttggactcaagtgatcttcctgcctcaacctcccaagtagttgagactacaggtgtgtgctgtctcacccagctaattttaaatgatttttttttttttagagacgggatcttgatgtgttgctctggctggtctcaaactcctggcctcaaatgatcttcccagagtgttgggattataggcttgagccaccacatctggcctaactgttcatttctgaagactctcatgtcatgggaaagcttggttaaataaatttgctatgcttttatcttgttaatttgtcttttgttatgaggctgtcagccaaggaccccttgatgggtgaggaaaagatattactgtttctttttttttttttagacggagtttcgcttttgttgcccaggctggagtgcaatggcatgatctcagctctcgcaacctccacctcccgggctcaagcgattctcatgcctcagcctcccgagtagctgggattacgggcatgtgacacctagcccagctaatttttgtattattagtaaagatgaggtttctccatgttggtcatggcctcgaactcctgacctcaggtaatccacccgcctcggccttccatagttctgggattacaggtgtgagccactgtgcctggccgatattagcttttctcggctgcagtagacactagagctacaggagagaaaaagacagggtccttggcctcagagaacctaaaggggagtgcacattcagtttggtttatttttagcccgtgactacgaggtatctggcactgtaggggtgttttggtttcctatggatgctataacaaacttaatagctcaaaacaaccacaaatttattagtttactattctgttgtccagcacgagtctaggctaaaattaaggtgtcagcaggagtgcataacttcctggaggctttaggagagaactggtttccttgccttttccagcttctagagaccatactttccttggctcctggccacatcctccatcttcaaagccagtaagagcaataggggcctttgcataccacatcactctctcactgtctccctcttctatttctaaaaacccttgtccaaacccttgtctaaaaacatttggtccacatagataatccagtataatctctttaaaggcagatgagtagcaactctcattccatctgcaatcttaatttccctttgccatgtaatgtaaaacattcccgtgattaggacatggactggacgtcttgtggggatgcattattctgtctaccacagaggaccgaatgataaagggaatactgtcattccccttaaagagacatttttgcaaagccttccttaaaaacacaagcaggattaagaaactccttctatattcccattacactgtctgcactttaaaaacacctcttttataacatttaacatgcttaaagcagtgtttgtcagagcgtgggacaagtaatacttgatagtttgcatttagtcattttgcactttaataattatgcatttattttaatgtgagtgaagagcataagcagcatatccaacctgtgatataatctttccttttaaattaaatccatttaagcttttaaagagtgagatgtaaaatatgaattagtggtacatactgtataggccaaggcaaaaaaaaaaaaaggaaggagtacttgagatgactgcaatataggaaaattacagttaatgttttctggataaattctgagttccttaagggcagagatttgtccatctgcttattactgtattaattttcatatttctggaatctgacgtctatgatggcataggtgctcaaatgtttattgaatgaataaataaagtaggattgtcttgtagacttctatttgcttcaactttacaccttttgaattactttcacattatggaaatgcagctaaagtaacagttgaacaatcatcatctgatattttagttagttcattttagtgagattttgctataatgtgtactctgtggaaataatatatgagggcacaaatattaaagattaaacgtggctgaggctcagattgttgttagtgaattaacaagtgaaaattataccaaagtataggaaggtggaagctgatatatacactagatttccatcttttccctcttggtgcctgaatcttagtaaaagtgttctggtttgggggatgtttcttgaattacatggttcattagctcgttcatgcattcagcactatggcaggtccattgtcgctgagaataagcaagatgtggaggacacaaaaataagacccagtcactgcctttgagaagctttgatagcaagatccacacttaaacctattactgccacataatcaaagagctatgccaggaatgacagttcctgggcttggaagcattcaagctgagtttgcagtttgagttcaatcaagttaattaatgctgcaccaaagaaagcaaaaacaaataaactcctgtgaaagaatataacagaatccagaattctacaacataaactttgtaatatgcagggtacaataaaaaaaactattcaacatatgaaaagccaaggaaatgttacccattcttgagagaaaagacaatcaatggagatcaaaaccagatggtgaaatttgcagacttgggttttaaagcacctttgagccacattcattgacttaaaggaaaatatgcttgcaatgaatgaaaaaataggaaatctcagtggagaaatataatctataaaaagacccaaatagaaattctagaactgggccgggcgaggtggctcacacatataatcccagcactttgggaggccaaggcaggtggattgcctgagctcaggagttcgcaccagcctgggcagcatggtggaacccggtctctactaaaaaattcaaaaacaaattagccaggcatggtggtgtgcacctgtagtcgcagctactcaggaggctgaggcaggagaattgcttgaactcaggaggcagaggttgcagtgagccgagatcatgccactgcactccagcctgggtgacagagcaagactctgtctcaaaaaaaaaaaaaaaaaaaaaaagaaaagaaattctagaactgaaaaacacatctgaaatttaaaatgtactggatgtgcttgagagcagaatgagaatgatacaggaaagagtcagtaaactttaagatagatccatggaaattatttaatcttgaaaaaaaaagggagagaaaaaaaaggtttaaaaactaaatagtctcaggaaccagttaaaaaaagtttaacatatatgcatttggaacctcaaaaggagataagaaagactatttatctttcttaattatttttctactgcccttatttggaggtaatggttcaaaaaaacaattgtaataaataatggatgaaatttccccaaattttgtgaaagacataaatttacagattgaagaaactcagcaaaccccaagcaagttaaatatgagtaaatatgaagaaaaccatgcctaggggacatcatagctaaatgctgaaaataaaaataaaggggaaaaatcttaaaaacaagcaaagaaaaataatataatacatagaggagacaaagatttgaatgatttttgacttctcattaaaaactctggaggccagaagacagtggaagaacatctttaaagtgctgaaagaaaattcacttggcaaacattcagtgaaaatattcttcaaaaacgaaggtgaaataaagatatttttagataaaaagaaaagagaatgtgctaacagaatgacactaccagaaataaaagaaaaattttaagttgaggagaaataagaaaagctggaaaatcaagtccttaagaaggaataaagactgtcagcaatgacaaatgtctgtctaaatatcaaccctataactgggaactatatccctccttccctatatgagttctgtttaaagttgaacacaaaaggaattccatgatatctctgacatggaaaggaagcagtaaccattactccctgaaggcttagagtcagatgcagcgactgaagaagaaacaacttgggcttggtttacagatggttctacacaatatactggtaccgcaaaggagagctgcaacacgacattgccactgaaggacaggggtaaacagaaattctctccgttggcaggaattcaagcaatgtacttgttgttcattttgtctggaagaagaagcggctagagatatgtatgtatactggcttatgggcaatggcaaatggtttggccagatggtcagggacttgaaatacaattgggaaattagtgacaagaggatctggggaacagatatgtggatatgtggataggcctctctgaatggacacagaggacaaagatatttgtgtgccacatgaatgcttgcaaaagagcaaacttacccgggaagatcttaatagacaagacagcccattctgtagatgtcagtctcgttgccacctttccctggcttcgcccaatggactcatgaacaaagtgaacattgtagcagggttagagactatgcatgggcttttgcttaccaaagctgatccacctacagccactgctgggtgcccaaccagccagctgcagagatcaacaatgagctcctgataagttatcattcccaaaggaatcagccaggcacatggtagcatattttttacattctctatcacttccatatggcagtgatagcactttggtctcaccaaaatagacatttactctgtatatggatttgtctttcttgcctgcgaaccttctgctaaaaccatcgtctctaggctcacagagtgctttatttagtgccatgatattccatgtagcatcactgctgatgggagggctcattttatagcacatgaagtgccacaatggactcatacttatagaatgcccaagtctcacaatcatcctaaagcagctggcctggtagaatgatggcatagccttttgaagactcagttgtagcgtcagctgggtggcaacatttatgggcctccagaatgtgatacttgctctaactccatattggctgatgtttctctcaaagcccgaattaagatgtccgggaatcaaggggtggaaaagggagtgatttctcttactagtcccttaataattcacaagcaaagtttttgctttttgtccccattattttgggttctgcttgtctagaggtgtttgattctgacagaagacacaacagtggttctattaaactggaagctgagactgccacctggctcctttgtgtttctcgtgccatgaaccaacaagtggagaaagagcttactgcactgactggggtgctccatcctgactctcaagtggaaactgggtggtgacctcacatgagggcagatgagcggatgtctgaaccataggagatcctcttgggcacctcttagcactcccatgtcctgtgacaaaagttagcaggaaacgacaacaagccagctcagacaggattgccagtggcacagaactttcaggaatgatgaaagcatggctgctgaggtgcttgctacaaacaaagaaaatatggactgggtggggaagaagtaagtgatgaatgtcagccatgaccatgtggccagttgaagaaaacaaagactgtcatcatgattagtaatttcaaaaagggacccagctagaagagaaatgagtatcacacaaagatggataagaggaagatttgtgtatcctcttttggggaaaggatgacatgtttggggtgttcaagttgtgcatcctgttaggtggaggcattatttttctactgcctttatttggaggtaatggttcaaagaggtgtgtgtggataccaagttgatatagagtccaggggtgtccaatcttttagcttctctgggccacattggaagaagtattgtcttgggccacacatatgacacattaacactaatgatagctgatgagctttaaaaaaaattgcaaaaataatctcataatgttttcagaaagtttacaaatttgtgttggtccatattcaaagctgtcctgcgccgcatgcagacctcaggccacaggttgggcaagcttggtgtagcctgtgttagattgtcctattgacaacttggttgagttggaaatttcactcccagaatcctcttctctatatgattctgcgttaaatttggccaaaaggggaacttgaaaaagatctgggaggcagaggccgggcacggtggctcacgcctgtaatcccagcactttgggaggctaaggcaggcagatcacaaggtcaggagactgagaccatcctggctaacacagtgaaaccccgtctccactaaaaatacaaaaaaaaaaaaagaaaaaaaaaattagccgggtgtggtgacgggcacctgtagtcccagctactcgggaggctgaggcaggagaaaggtgtgaacctgggaggcagggcttgcagtgagccgagatagcgccactgcactccagcctgggtgacagagtgagactccatctcaaaaaacaaaaacaaaaacaaacaaacaaacaaacaaaagatctgtgagccagaagtgaagcagcatcatttttgcagggcatcacagttacatgcagaaacaacagcacagaggtgccagggatcccagcttggccttgctccccgcctgctccatgcccagcacatcctcctgacagtagatcccctgaccaatagtggccctggggccaccaccagactcttggtggtggacccacagagtggtggttgcgctcaggcagcagcctcccatcaacatgtcccccacttcatggtcccacttggtggctggatgtacctgttctctcacatttctcctgaaagctccaacttgtccacctacaccagtgcttcagggaaagctggttaatgacttcatctctagccctctaactctccttaactaccttcacctccccagttcctctcatcattatgtaaggtctaattcctgaactaaatgtcttattaggttgctgcaaaagtaattgctgtttttgccatactttcaatgccattacttttgaaaggaatggcaaaaaccgcaattacttttgcagcaacttaatatctaacaacattgatagtggttccacttccctggatgtattttggcttccatactaggtggcatgggggaggggaggtggggatatactagagttccttagagaaatagggccaatactatatatataatataatattatacatatatatgatttcttatgggaattggctcatgcaattatggagaccaggaagtcccatgatgtactgttgcaaggtggggaaccaagaaagccagtgatgtaattcagattccacaggcctgtgaaacaggggaggcaatggcctcctagtccgaggccaaaggcctgaggactgcagtgggacaggggaggcctggagggtaagttccagggtccactggctggagaagcagaagcacagaagtctagatggaggtcccagtgcaaggaaaaagagaatgtgcccttcctccccctttttgttttatttcaggcctgcaatggattagatgatgcctacccacaatggggagggtgggtcttcttgactccatccactgattcaaatgcaaatctccttcagaaacacccttgtagacacacccagaaataatgttttaccagctatcttggccacccttagccaggcaactggacaagtaaaattaaccatgactagtagtgaattgcacacttgtgctggaagtttccatccatcaagaggtacatcatttctgcttaagccttattagccaaagcagatccgatggccacacctaacttcaaaaatggcagggaaatgcgatcctattgagcctaaaaggaacttgaaccagaatatttgtgaacatgtgaaggtgaccaccatgcataggaaataagtaaatgaccaatagatatttggatatttggatgaatgtatagatgtgagattttaaatatttataaaggtcagtagaaatcaacaaagaggaaaacaaattttattggtcaggtctcatgcactatgcactaaccttgtataaaatcacttacaagcttttcgttagacctcaaaaactcctataaaataaatttccttctcattttacaaactccatgaaatcaggaaccatgctttttttaatgggctgtattttttagagcagttttatgtttacaggaaaaacattgagaagatagtctggagagtttacataatgttgatgaaaagagtcaaactctgtaaaatatttgaagagatttattctgagccaaatatgagtgaccatggcctgcgacacagccctcaggaggtcctgagaacatgtgtccgaggtggttggggtacagcctggttttatgtattttagagaggcatattttagggagcaatcaaatacatttaagaaatacattggtttggtttagaaaggcggacaactcaaagcaggggcttccaggctatagggaaatttaaacattttctggttgacaattggttgaggttatctgaacacctgggattgatagaaagaatgttcatgttaaagataaaggattgtggagaccaagttttattgtgcagatgaagttcttaccagactttagagacagcaggtggtaaattgttttatatcagacttaaaagggcaccaggctcttagttgattatctcctggatttgggaaggaaggaaggaaggaaaaccaaggggaaaagggattctctacagaatgtggttttttcccacaagagactttgcagggcaatttcaaggtatggcaaggaaatatattttggggtaaaacattttgattttcttccttgttatgccagagtcagattggaaagtcacgagatacaggattaaataaaatccatttgataaaaatttctggtttttaggacctcttagaaaggaatttgggtaaggtaaaaaatcagagtttagtcttcagtcctccctcttggccaaaaagcattcacagaaagcatatgcaggccaacagcggcagattccatggctctaggagcacttattcctagagttgtctgatctgttcatttggcgaggtcccacggtgctaggaaggcttattcctagtgtagtctggttgatggtagttttaaatattagcgatttggataatggggggaggacatggtctgacctgatgcaatagccaattgtttaccgagtgagatggagtcaggcctagggtttagcctaaaaaaaaccatcccggatcagatctattttctgagttattatgatccaggtttttaattgtgtctttccttttgctgtacctggcataatatttgcaagaaaatgtctaatgttaatatagtaacaaatataaagatagtgaaggtttgggcgtccaaggttgtagttagaatcagaggacactaaccaacccaatcagccagaaaaccccgtatgcatcatcatatttttgatcaaactcacaatgtgtttaccttccttattaagggttatttggaccttgtgataaatcttacttgagaattgtgggacaaacattaaattagaatttaataaatgtaatctcttttctagccaatgtgtttccataggtatagcatcctatgcatataacataaattaaataccagaaacacctggtcctcagtgtttaaattgtgatagacttgttaacagtagacaaatctatttcccgcccaccacccccaccaaccgacttttgtgttgcaccatatactggtatttggagggaaaaggttttgtcgcaggagaagttatataattctacagtgttatttttttccttggcaggactatctatggctgaggaccataagagttaaaagacttatagccaattaattgttctaggccagataggaagggttgtggacagccatttgttacttttaaaaattattagtttaagtaaaaaggccagcagaaaaaccaaaaggcaaagttgcaagactgacttatttttaacttctatgtgttgagctgctgtgagtttggtttttgttacagacttacagcaattagctatacaaaacataagcactgctctgaaaaattaaaaatatatatggatagataggtttatttttaccacttatcattgggagtattatacccaggaagctttgtggtaaggtattttatcctgttagtaaatgtttttctttaattttacagcaaaattttatggttgggatggatgcaaaagtgacaaataatagtttagaagacaagcaaacttgttttaccagctgtttaggcattttttttttggacctcctttttgatttggagggtttgatcttgtcctaattttatccctcgaaactggcccttacaaattgtacatgcccacctcttctgcgatagtccctggacctagagggaggcagcttgtatagctctggcagcaaagcattagcagtgaaacagatccagacccagtggatgtcaaatgagggagattcctatctctggtcttcagaataccatgattttggtttgcttggaagtaaaacaaaaagagataaataacagttatagtttgacagttataacagtaatttgtatgttagaacagaaaaaggaacctgttccattagggcaccaactgaaaacatgaagaaaaattataatcaggtactttttagaggattattgtagccaagaaataatgatttcatctgtatgtaaaaagttagggttgaaatgtagtattaagtgttacactttgcccttcaaacaatttttttgctgccttttttattaaagagaattttatagccaggccaatttgtgtgcaatgctagttttaggcttattatgcttgcctgatgatttgcataaaatgcagcaagaaatcgactggccatatagacttcttttaaagttgattttgctgaaactttacctaaaaataggctatactagtttcagtcttggtaaaataaccagtgtcaccaattgttaggaaaaaaaaaactattattgaacttatgcagacaactatattgccataaaattacaatctgaattttggaggattcagaaagggaaatttgcttacaaaaacatactttacccaaataatttaaaagaaaaagatttccttgacccttttttaaccagagcagcagctttgaaaacgagatgtttgcttaccttggaaatgtcatttacaaatcaaacagctcaggagagctattaggcattgtggaatttagcagctccttacaattagttctagaaaagagcctctctgcttattaggtagcaagattttatgtaaaccatttttattttattatggaactttttgggaaacattatttccattaatatagaggtagctttagttaatattccatagcaagccagtaaatgccccatcaaaatacctcagttgttgttattgaaaagtactcacagtttttgccatcagtccggataaatgctccacacaaaaggctatgcagtggaggatttacatgagcagatttacatgtcttcagttttatggtactagaaaggggaaaacatcccccagtgagttagatatagtacccacttttataagacatttaggtgaaaggggttacaactaccttacataaagcttgtttaaatatttcacattttataattctattaacctatatatttttatgttctggtcccaggaagcgtttttacccccagaccattttaccttttctggagaaaaggatttgggtttccagcggggggttgcatctgtgagatctatgagggatatcagatttgataaggcttcttaaacagacctatgattctgtgggaggggcaccatgtaaaagagacccccttaacccccaaattgaccatgacccaggtaatagacatatcaggtgggaggatatcccagttataaagctagtccaacatggcttgcatatgagagatattaactgcttcatctaggtacttcacttggtattttatagggagatttgggcagtccccttctcagggcaaacagaacttatatggcccactaggctgattgcatttcctttcttttcctttctttctttcttttttttttttttttgagatggagtagtcatattctgtcgcccaggctggagtgcagtggcgtgatcttggctcactgcaacctctgccgcccgggttcaaatgattttcctgcctcagcctcctgagtagctgggattaccaggcacccgccaccgtacccggctaatttttttttttttttttggtagttttagtagagacagggtttcatcatcttggcccaggctgatcttgaactcctgacttagtgatccaccttcctcagcttcccaaagtgctgggattacaggcatgaaccaccgggcctggctgtttgctttttcaggaataaacctttgtccattagtgattgttcagtagtgagctctgggtcctgcaagctcttaaattttgtagcatttaaaattaagaattttgtccttaaagtggttaagtggttatttttcaatttattatagtaaagtttttttttgttattgttgttgttgtttttaaagaagctaaatgataccaatctacaaagtggaacaattcctttacatgacaccctttggttttaaatagttacttggttttgcccttcccccatatcaactattttcttggtaaccatggggctcagagttttgttgccctagattgtttatttttttcatttagttttatttgtataacttcctttattataaagcaactcttaaatagtttcttaaccaaaaagaaacttagatttttttgagaattgatactatgtttataaaattttaacaaaagcatattttatatttctactattttaactgtttagtaacccaaatttccagtgggggaaaagaaaaaaccagagggttgaacatgactttgagaattttaaattactggagagttttgagattaaatttaccaaattaatttttaccaaagattaccaaggtcatgtgaattaaaaggcatctgagctagtgtttaccaatttgataagcatttacaattttttaagttacttgattagagctttttcatgtgatttggtagcgaaatatcacttccacatgacacatatagaaatagagatataacaggcatgcagaattaaaaggcaggtctttacttgtctgttttcaaaaataatttttttccttacttagataattagtaaaagttacaggagccaacaaaatgtgaaggagagagccatcattcaaggccttttcaaaagagaaatggtggcactttaaagatatcaatctgaagaatgttaaagaaacacattatagaatttaaaaatttttaaactttttgcattgaaaaaaagtcaatatttgtaataaaatcttgttttaaccaattgtttagttttgtattagtgcgcttttttagtattaaagacccatctctagaaagattattatgattttttttttttttctttttgagacagagttttgctcctgttgcccaggctggcgttcaatgacacagtctcggctccccacaaccaccgcctcctgagttcaagtgattctcctgcctcagcctcccgagtagctgggattacaggcatgcaccaccatgcccagctaatttttgtattttgagtagagacggggtttctccttgttggtcaggctgttctcgaactcctgacctcaggtgatctgcctgccttggcctctcaaagggctagaattacaggcatgagccaccacacccggcctgatttctttttaattatagccaataccagctgaattatacaacacccttaaaaatttattttactaaccttatgacttacctagacctttaacaatggttagactttctgttttatcctaaatatctctcttccttgaacaacccagttattttattttagggcaaaaattcaccacacaagattctttcttatataaaatcactttcctttttactttctttaccaaaaatacctccttatatctttaacttttttcatcttttatttcctgatttctttaccttgttttatacataacccttaaataaggtttgaattggacaaagatattgtacctctaataagaatgttaaaaaaatgttttcctacaattcttaaattggaaattacccagatacttaatatcaaataataaccttaggtcctaaattatgacaactttgtttacaagcatttattccattacatttacctcattaattttgtagtttgcctagattgtttactaaaactgtgagagccaatatttaaagttatttttctattaaccatttttatagctgtgaatttcaggtatttactttagtaataaaacttatggttagttttaaaagtatttataccaataactcagtatttagctgttgtcatttaagccaacaatatttcataagcatatacaggcaaaaatcattttgtcttggtctgtgttttatagtttataacccttatggcaaaaattatagtattcaagagtcaaactctataaaatatttgaagagatttattgtgagccaaatatgaatgaccatgacctgtgacacagctctcagcggggcctgagaacatgtacccaatgtggttgggctacagcttggttttatgtattttaggaaggtgtgagacatcaatcaaatacatttaagaaatacattggtttggtttggaaaggtgggacaactcaaagtgggggcttccaggctatagggaaatttaaacattatctggttgacaattggttgaggttatctgaagacctagtcaacagaaaggaatgctcaggtgaaagaaaagattgtggagaccaagttttattgtgcagaggaagctcttaggtagcagactttagagagagcaggtggtaaattgttttatatcagacttaaaagggtgcctgactgttagttgattatctcctggatctgagaaggaaggaaggaaaaccaaggggaaaggggattctctatagaatgtggatttttctcaccagagactttgcagggcaatttcaaggtatggcaaggaaatacattttggggtaaaacattttgattttcttccttgttatgccagagtcagattggaaagtaagtcatgatatacagggttcaataaaacccatctgatgagaatttatggtttgtaggccatgagtccccagacccctcagaagggaatttgggtaagataaaaaaatcagagcttagtcctcaataaacacctctgcaacacacacacacacacacacacacacacacacacacacacacacacatacaccatttcctctattattgatatcttacattagtacagtatgtgaaccccaaatatctgagacaggtcacagttaatatagaaagtttagtttgccaagattgaggatgggcgcttgtgacacagactcaggagctcctgacaacatgtgtccacggtggtcagagcacagtttggttttatacattttagggaggcatgagacatcaatcaacatacataagataaacattggtttggtccggaaaggtgggacaactctaagcagggagggagcttccattccaggtagatgagagacaagtggttgcattcttttttttttttttaagacagagtttcgctggagtgcaatggcgtgatctcagctcaccgcaacctccgcttcccgggttcaagagattctcttgcctcagcctcccgagtagctgggattacaggtatgtgctaccatgcccaactaattttgtatttttagtagagacagggtttctccacgttggtcagactggtctcgaacttccaacctcaggtgatccgcctgcctcagcctcccaaagtgctgggattacaggcgtgagcccctgcgcccggccagttgcattcttttgagtgtctgtctagcctctccaaaagaggcaatcagatacacatttatctcagtgagcagaggggtaattttaaatagaagaggaggcaggtttgccctaagcagttccctgcatgacttttccctttagcttagtgattttgggaccccaagatttattttcatttcacagtacattcatcataattaacgaattgatagtgatacattattattaaagttcatactttagcttgatttccttcgtttttatctaatatcctctcttcttcaagaatcccatcgaggatacaaattacatttcattgttgtgtctcctttgtctcttttcggctgtgaccacttctcagattctcaggctgtcctttgtttttggtgaccttgacagttatgaagagcactgtttgggtattttataaaatgtccctcatttgagatttgactgatgtttttctcaaatcagactagtgttatgggttttgggggtgaccatttacttaggcaacacagggctgcatttggaagcttgttttttgtttgtttgtttgtttgtttgttgtttttgagacggagtgtcactctgtcaacccaggctggagtgcagtggcgtgatctcagctcactgcaaactccgcctcccggcttcaagagattctcctgcctcagcctcccaagcagctggtattgccggtgcctgccaccacacccggctaaatttagtatttttagtagagatgggatttcaccatgttgcccaggctgatctcgaatgcctgatctcaggtgatctgcccaccttggcctcccaaagtgctgggattacaggcatgagccactgcacctggccggaagtttttaaataaacgttttttgactaaatgaatatttaccagtaagaaaatacattcagaaagtttaagaaatgtgttgaaagatatcttgctcatcagaggcaaaactaggatagaacccaggactctgactcagaaactctactttccactagattatattaacctcaaaataattatagcaacagcttctagacactgtcctagttaatacagtatatattgtttctaattctctcaacaccatttcaaggaatgcattattatcctattttcctgaagctcaggggtatctggagcatcttctccaaggtcacatgtgaaaaagtggcctgggttttgaaccaactgtggctgcctctagagtttctgcccacaccattaccatcgcagcgagctctcaaagacgaccaagtgattcttcccgcctcaaaactctccaaagcctcaccgacactgccagtgaaactttgcctgccctacgcaccctcacttcccactttcccaactgcacttcctactccaggcatgggaagcccctggccactcccctaatgggcgcgctgcgtcgaggatctttgtaagtgctcttgtcatgcttagaacacctttcctctcccatctcttgcccctctgtgggagacgggggatcttatttatatttcacccatcagtttcaactcccaactctatgaaacaaacctctgatccatccaagtggacttcatcctcccaacattgtgcaccttagttcatagtgcatgccactattattgtactgatcgtatcatagtgatattgttcaagtatagctcttactctctaatcagacatggaacttctctgggcaaggatactttcctattcatctttatacctaccataacctagtagagtgcctggcatatcaccagtgttcaataatgagtgaatgaatgaacaaataaatgagtaaatatggaagagtatataacaatcttccaagcaggaacgtacagctcccgaaagtgaactgaatgctgcctccagactcccttctcctccaaagccaggggcacatggccaatcgctccaggagttttccatcttgctattaaatgcatcttgttggatccatggacgagtaacaccaaggaccttagagtgaagaattggcttaatctcagtatctaagcaagttaatgagccagaaatccagcagagcctcttctgtcatttcgcaaagaaaacacaggaaaagtcccatcataaactaccttaaggccaagtatctgttccacaaagacattctcatcagctctgtatagaagaatcagatgctggtttaatcccctttcgcttttgctgtccctgagcaattcaaagtggagtggaaacctggcagttaaccaattagcttgattggaataaacagccaaattagataattaatgaccatgtttgccaaatttccacttcattttttgctgggtagatacatccctgaggctacagatacatttacaagcaaattgcccaattttcctgctgaatcctcctgtttcatgaatctcacatctaccccttctggttcttttccatcactttagaaaacaactagagaaagagtcatgctcacaacatcacaacactgggaaactaaccctcacacctggttcttagaaggagactggtgtccacatctggcaggtcaacccaggccaaggttatgaccttgcctttgctttctacatcagcatccgcaaaatgactgctctgcctgccctttgacacaggagccaagaaaagtgggagatcccctcctacaggtcacatactggatgtgacttgaggaattgatatccttcctctccagattgtttcatctcactatttgcatgactgggagaagctacgtctattgcttcccaaaggctctttttggccactattgcattgatggaaagttgagtggcaggacatttccagatcaaaaaaagatttctggaggtctaaaggaggcagttttttgtaatggaagtaacatggtggttgtcttcatttgtttgtgttgctataaagggatacctgaggttaggtaataaggaaaagaggtgtgcaagaaacttggggtcagcatttgtttctggtgaggcctcaggaagcttccactcatggtggaaggtgaacaggaacagtcatcacatgatgagagaagaggcgagagagaggaggtgccaggctcttttcaacaagcagtacttgtgagaactaagagtaagaactcattcattaccatgtgaggactgcaccaagccattcttgagggatccacccccatgatccaaacacctcccactagcccccacctccaacattagggtcagattttaacataagacttggtgaggccgagcaaaccatatccaaaccatagcagtggtcaacaagataaggagtataaagcatcctgcacagattttaatcaggtgctgggaagctagaagatgggggataaagagagttgcagagccagtattagcacagtcagtccaccccgtagctatattcaattaccggcgtgagagtactcaggaattctcaaacctttcaagaagcacactttcttttttcattatttagaggatactttattagtttctgtaaccaaactcatgtagataagaccttacatatttaatatagtgtgttacccctgtacaaatggaaaaatattaagtttaatgtttctagaccaatatggctgttaatttctgtacaacgccaacttaacacagtaaactgggatactttttccaaaggtcacagcacagctgaagtttccaaaaattcaaattatatatatatatttgtatatatatttttatataaaaagaccaataatagcagtatgttatacatcaataacagcaacagcttttctaggttctgcggtcatctgaacaaaattatagagacatccagcacactccatttaaaaaaagtcagggggttggggaaaggtaaaaaacaaatccccagaaaattgcaaagttctgttactgttatggtactggcaccattttttaaaattagcttctgaatcatcatctggaaagaaaacattctagaataacatccttaaaaatagctctgataaagcatggtcactactacatatcaataagcaggtacaagacattttacaatcacacaggtatgacacagaactgtcctatgccaatagatagaggatacaattaaaaaggcattacttggccgggcacggtggctcatgcctgtaatcccagcactttgggaggctgaggcaggcggatcacctgaggttgggagttcaagaccagcctgaccaacatggagaaaccctgtctctactaaaaacagaaaattagctgggcatggtggtgcatgcctgtaatcccagctactcgggaggctgacgcaggagaattgcttgaacccaggaggcggtgagcagagatggcgccaccgcactccaacctgggcaacaagaatgaaacacatgaagaacatagaagcccaaattgagagacattccacaaaataatcaaaaatcctcaaaactcaatgtcatgagtactaaattaattaattaattaactaagtaacatgatctaaaaaaaaaaaaaaggcattatttgagacttgattctacttttccagcagagggcccaaaggatggcatgacacagctctgtaaagaaaggcactttcttaggatttcctttaattagtgacacagttctaggtctcactgttcttcatgaacaccagctaaaaactggtttaaaaaaaaaaaggaaagaaaagggaaaggaaaaaaaagaaaagaaaaaaaccccaaaaccatgggattcatacaaagatgactgagtgggggcaagaaagactcagcctaactagtattttaccaaatctgacacgtttgaatgatgagagctccatggaagaaaggagatgctaagaggtgaataagcacacttttaatggtcacatgtctacattacactgggcccttgttgggattttttgcattaaaaaatatctttttagtgtctacctacttcatgctaactgctattctacagacacaatgataaacaagaccaataacttacaatctagtgaacaggcattatcaccttctcactcctgcaaagctgatattaaaaccccatcttggtcatccctgagcactccaaggtctacaaaccaggtagagatgctaggacgggaactaaatgcagaaaacagatcagagttgccagggggtgaggggcagggtggacaactacaaaagagacgcacaggacaatttttaggtgaatgtagtgttctacatgtactatggtgatggatacatgcttctatgcattttcaaatgccattgcaatgtatctcacaaagaatgaagttcaatgtaggcaaaaatgttaaaaatcaaccaggaggtcatggaatctcaggaggtaatgcagacagtgataaattgtattacaaatgtatcacataatccagttagcagcaagcacaccaacaccagatattggcttctaaataccattctctgacaaaagaaaccagagcactggagaaatgtttgattctagggctgggacagggaaaatgcaaaatgagcctggagtattgtgtagtatcaagaaaggaagtgctcaaaaaacagaaggatggaggcaggtcaaaaggacatgacagccaaactgaaagagttcccagtggccaaagctggaacaaattgagtactaaattaattaattaattaactaagtaacatgatgctaaattgcaatccaaagcataaaataattatacatgagtccatactgatataaatttattcatataattaaataaatatgtaaataagggagaaaagatatagctttcttaaaaaagaattcgaaataattatgtagatactccccttcgagagatggagtctagtgctacctccctgtgcttgaacctgggtggatctttatgacttgcttccaaagaagagaatatggaagggagaaagggtaactttacagtggagaaaacttccaattactaccttgactgagtgatcaaggagaggcaagggctgaaaaactacctgttggttagtagttcactatttggatgatgggctcgagagtaattcaaacctcagcatgatataatgcttagcatttattaccatgtaataaacctgcacatttatcccctgaatctaaaagaaaaaaaatttaaagaaatttccaagttctcaaactgagcttaatgaagaccacaaattagtcttgacttttctcaatccctgactgtattgagatgttcttctcttctgttgtctgccagagtatagggtgaatcttctctggaggtagataatatgatccagagctctataatttattatgtacaacatccagccttcaattgaaaattatcagacataccaaaaaacaggaccaaaagaacaactagagaatagacttacaggttcccatatgctgaaattatctgatatagattttaaaataactgtaattaatatgttgagaaactagattaccagatgaagttttcacccagataattggaatttattttttaaacacaatggaaattataaaactagaaattacaaaactgaaattaaaaacataacatgaggttaatagtagattaaacatagcaaaaatgaagattggtgagctgcaagataggtcagcagaaaatatccttactggggcatagagagcaaaatgaataaaaaaaccaaaaacagcataagagacatgtaccacacagtgaaagacttaacatccatgtaattgtaacaatatatgcagaaataatggtcaaggatttttccaaatgaattaaagacatcaaaccacagattcaaaaagtattacaaactctaagcaaagcaagcaaagaaaatcataccttctcacataatattaaactgtcagaagccaaagacaaggaaaaaagtctgtttaactgcctgagaaaaatatatatattattttccaaggagaaaacataagactgacatctcagcaaaaataatggatacagaagacaataggacgttgttatggactgaacgattgtgtccccccaaaattctcatggtgaagccctagttcccaatgaatgatgtttggaggtggggtctttgggaggtaattaggtcatgaaagtggagccctcacaaatggccctcatatatatctcttatgcttcccttatatgaagagatgtaatagagatgatcaatctctctctaccacatgaggagacagcaaaaaaggcagccatctgcaagcgaaaaagagggctccaaccaggaaccacattggcttgcatcttgatctcatacttgctggccttcagaactatgagaattaaatgtctgttgtttaagccactcagtttgtgatattctgttatcccagcccaagcagacaaaaacatatgtcatcttcaaagtactaaaagaaaataaatgtcaacagagaaatctacatccagaaataacatccaataaaaatgagaaagaaatgaaggagtttttctaatgtctaccaggagacttatgttaaaaatggacttatttagacagacagaaatgtatgaaggaattaaagggaacaggaatggtaaatatattgctgaaactaaattttatattgactagatgaaataataataatatgtggtacagtttcttatattgtaaaataaaaatgcattgtaaagggtagaaaagagggaaatcaagtcaaagtgttgtaaggccctagcattaatctgggaagggcaaaggtactaattaatagtagtctttaaaatgacagttgtgatatttaaagtgatcactgaaagagtagtgaaaaaatatgcatgtaactaataagctagcattgggaaaaacactaaaacacaatccttttaaagcataaaatgaggaaaaaaggaaaataagaaataagcagcaaacagagtataactagtaggatgatggatatgtacctgaatatgtcagtaatttaatcagtgtaaacaatctacatacttcaattaaaaatcaaagattggtaaggcacttctggattgatggggccctccaaaattccactcctccataaaagcgcagagaacaacagaagcagaattggtcaaaatcacctatgtcagaactctggaaattaaccaaaggctaaccaatatgaggtgcatttattcaagaaaaatagctgaatcttagtaaggataacaatctttgtggttttttaacttgccctggtcccacccccacccctacctttcagcttaaaaaccagcagcctcacaagcacggcagctgtgaagaacagcagtctagcagccactggaaggggcataacagatttgaaaccctctaaaaaaactcattcccagagagttgtcactatatggcccttctagcaactccctggaaaagccccattcataaagcccctctttatttgacctgactcagagctcactcagtgggcatttgtcaaaatcatcagtgccaattaattaacatcacagctgcctcaagtggcaaaactagttgggccaaatgagaggctggcagaaaactcaaaaggaaaatatggaaaacgagatgtccatagggaactttgaaaaatctaaaaggccatgagcatggctaggatttcatgcatgcccaggaaatatctgagaaaaccctaatctcttaccggtgtctaaccttgaggctttgtacaagcaggaaatgaaggcaaaggcagaattgtaagccactgaacactgaagatataccccgacacacacacacagagcccctcaacttaaaatgagagctatactggttcaaggcatttgaggaaacctctgtctaataatcatatgaacattaagttagtcaagtagaagctttagtggccacacacaacaaagaataaaacttcacggaataagcccaggaaagtcactagaaaaacaaacaacaacaacaataaaaaacaacaacaaaacttgaagagcaaggaagaatctgacttccagagtggctgcattctattatttttaatgtccagtattcacaaaaaagtataagatatgaaaataaataggaaaatatagcctatatataggaaaaacagtcaacagaaactatccctgaataagcccagatattgaacttgctagacaaatactttaaacaaactattataaatatgttcaaagaactaaaagaaactgtatccaaagacttagagaaacatctcaccaaaaagaaaattactgggtatatacccaaagaaaaataaactattctaccaaaaagacacctacactcatatttttatcacagcactattcaaatagaaaacacatggaatcaacctaggtgctcatcactgatggattagataaagaaaatgtggtactttggaatactacagaaaatccccattcataaggcccttctttatttgaccagactgagagcccactcagtgggcatttgtaaaacaccatcagtgccaattaattaacatcacagctgcttgtgatgttatatttatatagaaaatataagaaatggaaattctggagtagaaaagtagaataactaaattgaaaatttcagtagaggggctgaatagaagatttgagatggcagaagaaaaaaatagaaagactgaagatatatccattggaaggacataaggaatagaaaggggaaaaaattaagaaaaactaacatagcctcatagacttgtaggacaacatcaagcctaccaacatacacataatgtgagtcccaaaaggaatataggttattctatattatagaatagatatagaataatgtcaataaaatactagtgaacgaaatcaagcagcatataaaaggattatacatcaagaccaagtgggattcatcccaggaatgtaaggttagtttaatacccaaaaatcaatcaacataatatacaatattcatagaataaagctgaggggggaaacatatgatcatctcaatagatacagaaaaagcattcgacaaaatccaacatctttttataataaaacaccctacaaactaagaatagaaagaaacttcttcagcctgataaagggcatctaggaaaaaacctacagttatcattatacttaatgacgaaagactgaatgctttcccttaaggtcaggaagaagacaaggatgtccattcttgcctcttctatccaacattatactggagggtttaggtagtgccattaggcaagaaaatgaaataaaatgtatccagattgaaaaggaagaattaaatatctccattagcagatggtatgatcttctgtataaaaagatcctaatgaatctgcaaataaaactgtcagaactaataaatgaattcatcaaagttgaattcaacaagatagtctacaagatcaatatacaaaattcaattgtagttctatacactgacaataaactgtttgaaaaacattttataaacaattctatctataatagcaccaaaaagaataaaatacttagaaacaaatttaacaaaacaagtacagttatgtttcacttaatgacagggacacattctgagaaatgtctttaagacaatttcatcattgtatgcacatcatagagtgtacttacacaaacctagatggtgtagcctgctacacaactaggctatatggtatagcctattgctcctaggctacaaacctatatagcacattacttgactgaatactgtaggcaattttaatacaattataagtacttgtgtatctaaccctctaaacacagaaaagctacagtaaatatacagtattataatcttatgggatcactgtcatacatccagtccacaattgactgaaacattgttatacggcacatgattgtacaagatttgcaaactgagaactagaaaacattgttgaaacaaataagagaagacctaaaaacatgcaaagataccatcccatgttcatggatcagaaaacttcatactgccagaaggacaagactcccctatattggtctatggaacttagtagcaagaaaacaagcttattttaaaatgggcaaaggacttgaatagccatttctctgaagaagacataaaaatggccaaaaggtatatgaaaaggcactcaatttcactaatcaacagagaagtacaaattaaagccacaaggagatatcacctcacaccttttaggatggctattatcaaaaagacacatgataacaagtgttggtgagggtgtagagaaaatgaaacccttgtactctgttgataggaatataaattgctgcaaccttcatggaaaatagtatgtagattcttctaaaaattaaaaatagatctatcataggatacaataatcctttttctgggcatatacccaaaggaaacaaaatcagtgcttcatagagatatccgtgcttccgtgttcattgcagcattattcacaatagccaagatatggtaacatcctaagtgtctgtcaacagatgaatggataaagaaactgtgaataatattccatttgactatagtaacacttcactatgtatatcaaaacatcatgttgtacaccctaagaatatacaatttttaaaaaccaaattgatgtatagcttcaaaggaattgctatcaaaatcccagatgcgttttttttccttttctttttcctttccttttttttttttaacagagactaacaagatgatcctaaaattcatatggaaatgcaaaggaccaagaataatcaaaacaatctttaaaaagaacaaagttggagcacttacaaatcccagcctcaaaacttaacaataaaacagcatgatactggcataaggatagaccaaaatatcaatggaatagaattgggagttcaaaaataaaccttcatatttatggcaaatttatttttgacaagagtctaacacaatccaatagggaaattgtcttttcaacaaatggtgttgggacaactggttatccatataaagacaacagaagttagattccaacctcacaccatagccaaaattaactcaaaatggatcatcaacctaaatgtgggagctaaacctataaaactatgaaactgttaggagaaaactgttggggtaaatctttgtgactttaggtcaggcagtactttcttgattatgacaccaaagcataacaaaaaaaagataaatcatacttcatcaaaattaaagtctttggtgcttcaaagaagacaatcaagaaaatgaaaaggcaactcatagaaaggaagcaaccatcataggaatgaatgctcagtatcactagtcattaaggaagtgcaaatcaaaaccacaataagataccacttattagaatagctagaatcaaaatcgaccataacaaatgggggcaggaatgtggagaatttggaatcctcatgcaatgctggtaggattataaaatggtgcagtaactttggaacactgtttggcagttcctcaaaatgttaagcatagagttattgtatgacccagcagtttcactcctacaaatatacccaagagaaatgaaaatatattttcacacaaaaacttgtatttgaatgttcctagcaacattttttataatagccaaaaagtggaaacaacccaaatgtccatcaatggatgaataaacaaaagatggtatatacatactctggaatgtgatttggcagtaaaatgaagtactgatgatgaaccttaaaaacaataagtggaagaagccagtcacaaagatatattgtatgattccttttataggaaatacccagaacaggcaaatccacagaaacagaaaaaatacatcagtgtttactaggggctaggggatgggggtaatgaagaatgactgctaacggatatggggtttcttttgggagtagcaatgaaaatgatctaaaattaaatagttgtgatgattgcaaaactctgtggatatactaaaaccactgaattttatactgtgaagtagtaaattttactgtatgtgcattatatgtcaataaaatattactttttaagttttttttttttttttttttttttttttgagacggagtctcactctgttaccaggctggagtgcggtggcacgatcttggctcactgcaacttccacctcccgggttcaagcgattctcctacttcagcctccagagtagctgggactacaggtgcccgccaccatgcccagttaatttttgtatttttagtagagacggggtttcaccatgttggtcgggctcatctcgatctcctgacctcatgatccgcccgcctcagcctcccaaagtagtgggagcaacagcacccagcctttttaagtaatttttaataccaaaaattgtcagactgcgtttttaaaacatgcatgctgcttataagatgctctgtatagaagaaagttgaaagtaaaataatgaaaaatatatactatgcaagcactaatcaaaagaatgctgacatagctctcaaacaaggtagactttaagacaagaagcactgctagagctatagatgaacactacccatggcatatgtttacctatgtagcaaacctgcacatcctgcacatgtaccccggaacttaaaataaaaagatgaacatttctcaatgaataagtggtcaatttcccaggaagatacaacaaaacttgcatgtgtttaataacacagcttcaaaatatacaaaacaaaattgaaagagctaaaagaaatagtaaacaaatccacaatcacagtaagagtcattaacacaccatcctcagtaactaataagacaagcagaaaaatgacagtaagaatgatgaaaacttgaacatgattagccaacttcacaagtgtatgacatactgggaacataatattcaatgacatagaatatacattcccttctcaaggacacataagatatttattaaaacagaccatatcctggtcataacacaagtctcaaatataagagaactgaaatcactcagagtaaattttctaaacactatggaattaagctagaaataaatacagtcatgcattgcttaacaacagggatacattctgacaaatatgtagttggacaagtttgttattgagcaaacatcatagagtgtacttacacaaacctagatagtataacctactacacacctaggctatatggtatagactattgctcccaggctactaacctatatagcaggttaccagactgaatattttaggcagttgtaacacaatggtaagtatttgtgtatttaaacatacccaaacatataaagatacagtaaaaaatgatattaaaaatatcaaaatggtacatccatatatggcacttaccatgcctgaacggagcttgcagaactagaagtcactctgagtggggagtgaatgtgaaggtctcagacattcttgtacgctactgtagactttacaaacattgtacacttaggtcacacaaatttataaaaatatattttatttcttcaagaataaaccttagcttactgtaacttttttactttataaactttttaattttttttttaactttttggctcttttgtaataacacttagtttaaaacacaaacacaccggctgggcacaatggctcactcctgtaatcccagcactttgggaggtcgaggtgggtggatcatgaggtcaggagttctaaaccagcctgcccaacatagtgaaacccggtctctactgaaaaaaaaaaagtagctgggcgtgatggtgggtgcctgtaatcccagctactacttagaaggctgaagcaggagaatcacttgaacctgggagatggaggtttcagtgagccaagatcacaccattgcactccagcccaggtgatagtgagagactccatctcaaaaaaaacaaaaacaaaaacaaaacaacacattttacagctatacaaaaattttttttctttatattcttattccatatgcctttctgttttaatttttttatttttaaacttttttgttaaaaactaagacacaaacacatacatgagcctaggcctacacagagtaggatccttaatcccacagtcttccgcctccacatttcaccccactggcaggtctccacacaataacatgcatggagctgtctatgataacaatgctgtcttctggaatacctcccgaaggacatgcctgaggctgttttacagttaactttttaaataagtagaatgagtacactctaaaataactaaaaagtataatatactaaatacataaactaataacatagttgtttattatcattatcgagtattatgtactatacgtaattgtatgtgctatacttttatacaactggcagcatgataggtttgcttacagcagcacatagttcattgagctatgatgttacaacggatatgacatcactaggtgatagggttttttcagctccattataatcttatagaaccatcactgtatatgcaaactatcattgaccaaaatgttattatgtggtgcacaactttagctaaaaatccctaggaaatcttcaaatatttgtaagctatattgtttaatttaaaaaattccattttaaatgaatgataatgtaaacatgacctatcaaaacttgtgagttacagctaatgctgtaaagagggggaatttatagctttaaaagtgtacgtattagaaaataagaaaggctgaaaaatcagttgtctaaagatccatctcaagaagttagaaaacagcaggaacataaaacaagagaaagtggaaggaaggtaataataaagaaaagagcaaaaattaacaacatagaagaaaagcgtataacaactgaatatcaacaaggcaaaacttgattcttcaaaaatcaagtgaaaaaaaaagtgaaagaagaaatagcacagatactacacaaaactatcccagagaatagaaaaacagagtattcatacaaaaccattttatgaggatgaaataatatgggtaccaaagcgtgatgaagacattacaagaagagaaaattacattccatgggttgagctgggggtaataaaagacagtaagaaagagagagaaaaaaaatttcaggaaaatctctctcatgaaagcagatgcaaaaatcctaaataaaatagtagcaagtcagatccagtgataaataaaaaggagaatccttcgtgatcaagtgggtttattccagatagacgatgcctgtttaaaaattaaaactcagttaatgagtttaccatattaacataataaataagttaaattataagaccatcttaataaatgcagaaaagcatccaataaaatttcatctctattcatggtaaaacctttagcaaactaggaatagaaaataactttctcaatctaataatagtatctttaagaaaaacacctacatcaaatatgatactgatgatgcattactgaaaactttccatctgagatcaagaataaaacaagaatccctgctttcactgtaactatattgtactagaagttccagccattgaaaaaaggcaggaaaaaatgcaagtattggaaagtaagaaatgaaacgtcattattcccacacaacataatcacaacataattgtatgtataaaactctgaagaacttgcagacagttgagtaattttagcaaggtcattggatataaggtcaatttaaaaatcaattgtattttatatataaggaatgaacaattagaaaatgaaattttaaaaacagcatttacaatagcacggaaaatcagaatcgtgggaataaacccaaagaaaatttttctatacagaaactacaaaactaatattgctaatattatattattaattagtaattattagtaagtaaagagagagatgatgttcatgaatggaaagagtcaatattatgcagatgtcagttatctccaaattgatctatagattcaatgtaatcccaataaaaatcctggctttttttttcttttgttttcttttctttttttttgagacagtatctcgttcagatacccaggctggagtagagtggcacagtcatggctcactacagccttgacctccagggctcaagagagcttccctcctcagcatcctgagtagctagctgagatcacatgagcatgccactatactaggctaattttgtttattttttggagagacaaggtctcactatgttgcccaggctgatctcaaactcctgggctcaagcactcctcacatctccgtctctcagagtgctgggattataggcatgagccacagcaactcatttccagcaatttttttttattcctggaaattaaaaaaactgttctaaaatttacatggaaatgcagagagaccaaaaaaagccaagacattttcatagaagaaattagacattattgctgtcgttgtcatttttatatagtcattgttttcttaggtttattcacatatttacatttttgtttttctctattttttcttgcatttcagactttcttctggattcatttcttttcttcctgaattatattttttaaagttactaataaatgtctacttactaaactatctcaagctagctctccaattctaggtttacaattatttctttagcattttgaagacagagtatcttaatgttgtcttgatgattttgagaagtcagctatcaatctgtcatcacttaataggtcatctatcttttctcttttaaaatcttctttgtcttggtctttgactaagtacaaggtactctttccttatcctatttggaatacattgagcttgttgagtctattaattcatatctttcatcactgagggaaaatcctaagccattatctcttcaaatattgcctctccgccattctgtctagtctctccttttgattaaactcatgtaaaaccttttcgatctgccctctgtgtctcttatctttcttcttttatcctttatttctctctgctgcactttcagtaatttctcagcatctatcttcagctgcttcagctgcttcatctgctgtttaacccaaccatttgagttcctaatcccaagtattatattgtttatatttagaatgttagaattttattaatcttcccagttctttataatagtgtcttgtcccttagttttattttcaatactctcttttatttttttaaatatataaaatatatatatcttatatttctctttgctgattccagtatctggaatatgtatctcagtgtgatgttactggatttcagttcccaacccacacaagaacttgaaattaggaactctctagactttctctttccccctgtactcaaagcgaaggccaagatcaccaagaatcttcactttttacttctgtgagacaggcttccttcttgggattcttggctgtctttgggagaagtcccaggtttagtggaggtgaatggtctctgattcaacttcacactttgtgtgggccaagatcacctcctatgtcccccttcatgcacacatgcacacacacacacaagcacacaaatgcacatatacacacatctacactctagtcttccaggagcctgcagatgaccccagggtaaccgccagttgcagcactgatgtgcccttctagattcacacctaaccttgaaggatttccctcgctttactgccagatcacccatgcattcatttttcatctattttatcagtgttttagctgctatgtactgagagtttctctccagacatcaatatcaccaattttattgaaaaggaaatacaagcttaagggtttctattagataaatgaggagtagcccattgttgggtcaaatgactttctcgagttcagacaatgtcactcactaaggaatgtgggataaaaaacaacaacaacaaagaggagtgtgaatggggtggaggttgggatgttctcatgaaactctgcatacaatgttccagtaatggagttacgaatgaaatctacacctcctaatttccaaggttagtccttagcctaggctttctgacagctctttcttcaggaacacaggtagaataccgtaccagagattccacaatagagcggacacagccaatagcctattgaacacgggtgtgtttcaaagaaacccagaactggcttatcaaggtgaagacttcagaaagccctaaattcagcaaagtaagcaaaatgtattggggggaattattgagacatgttccctcctcaaggaacttcatatacagactcacctaggccagttcttcgctttcagacaggtgaacctacattgaaaatacagcatggtcttctgtggatcaatttcagaagtcacccaagctggaactctgcttctactgaagccaaagctctcttcatccaaaaaacaggacagcagcccagctcctaaggtctctgctgccagaccccattatgccactttcatttcccaaggcttccctctgcaacccaccctgctttccgtctatagttgaccatccttttcccttccccaccaaacctccacagtccctctctctcacagccctcttctccatgatcttgtgaatgcattgttgtttctaattttcactatcacagctgcaatacacgttcttgtgcacatgtgtcagtttctccaggaaaaatgccaatgagtgaagttggttgatcatagagtgtgcacattgttcactttcctagatatcaccaaagacctcaccatagtggtttaccaactgcactaccaaccacagcatatggtggaatcctggtcctccatatccttgccaacacatggtgttatcagagtttaattcttaaggagcttctccctacgagcctatccagtgaactactcccctctgacctgctgatgggtagtgaataacacatttgcactagttcagtctcttctgaacattggatcttagagcaggggtctataacactttctgaagagtgagctgagatctgtcaattcctcccagtggctgactgggagaagggaatgtgatggttaatttttgggtcaacttgattgggccatgggatgcccagatagctggttagacattatttctgggtgtgtctggaaggttgtttccaggagatggtaacatgtgaactggcatatagaatcaagcagatggccctccccagtgtgagtaggcatcattcaaatcactgaaggcctgagtagaacaaaaaagcagagaaaggttgaattaattctgcctgactgcctgagctggaacatcaatcttttcctgccctcagcactcctggttttcaggccttcagagtcagaccggaacctacaccacactctccagttcttaggcttttgcactgtatccctggctttcctgggtctccagcttgcaggtagtagatcgtaggactcttcagcctccataatcgcatgagccaatgacttataataaatctctttgtagatacagatatagacattaatatgctctgttggttctgtttctctggggaaccctcactaatacatggggaataatgactctatcttagtttgagtgagagcacatgccagtgagaaggagaaatgaggcttctaccacccacactgcttaccagcatgggtcttggagataaggtcagaaatagcactgactcttgagccagggaaactgccccgcctgctgctgctgggacacagtgcccagataatgggaacaccaggtcctggagccaaagggtagagagacatctggcctcaatgatagatggcagggcagaggaggccaagcaaagaagggacaaagaaacaggaatgagggcagtgaaaggcctgggagatctctgtgcacatctggatctgagacatgtgtttgcccatcattcttgtcagtgtcaagaggcagcaaagggggcagagtgattaagcatgacctcagaaggtagctaagctgaggtcttctacctacgagtccatgatcttacactgaccacttaccctctccctgcctctggttccttgtttgtaaaatgagaatattcatacctgtttataaagttgccatgaaaataaatgggataataacagtaaaatgcttagcaagggtctgatgcatagtgaggactcagtaaatattagttgttattcttatcaccatcattattgctatttcaaattatagcctatgaccagcttccttggagcaaaccgcaaatcaggactggcatcttatccatcaattctgattgatagtggttgtctgctgaggattccatggtcacccttgtgctcatctgaaaagaacagtgaactgtgatccattggcaatgtctgccatggctctagatagggagcaatagcagaggcaccatgcacttgattcccgtggtctacatttcacaatttatctggcaggaaatactgattcaggaatgttcccattttaagtttctaagagagtacctatgaacagcatcccccccacaaacacacacaaaagggctggtttttaaatgaggccaactgcacatggctctttttaaaactgtacggaaagcaggttctccctccttttctgctctgtagacaatatccatttcatcattcccggctgctcagccacattcctgcctgcagtggcaggtgagcctcgggtgggctcgtcataagtggggtccacacatagctttccacagctggagctactaaagcagacagccctagggtgccaagagattcacataagaacacggtgcaataaaaaatgcctgggaatccacaggcctggattccagcttcagcagaaacccacagtgtgaagctgggtggggcaagtgacttcacagaggcctagtttcctgtcaccaaaataaaagtcaatgatctccaagatctcttccaattttattattctgttctagcaaagggaatgcactcctgtagttactgtatgtttgaaagagggagaaacaggcaaagacgtacacgttagtagacccttgactttcttgaaggggaagctccaaaattttcttagattcccaaatggcgaaatagcactccagccccatttcttctggggattagtttttcacaatgatcaaagggtttataagtatgaaagatgatattatagaaaagcaagaattagaaaaatggattctggggcaggagctggtcctgtcttagtatctattcccctgcccatcctgccccacacacttgtactcacacacaccaacttcttagtccattgaaccaatgtcatatttcaataaaattataaattagtgcctatcacggacttctgctattaacactacaactgttaaattcctcaccatgaggcaagcatccattgaatacacacatacacaaagtacctagacaaccatagctgtgtagcctgttttggtaatatgtcatcaagcaaatgtgcaattgcttttgccaacagctatatactgaaaacatcatgataatttcccaaaaccataatggattttgcacctgtcttttctcatatacaataagtataatatgtaatgattcattagcacaaactcatatgaatgacttctcagaaccatccaggtcctctcatctgagtgagaagtgtccctttccaaacaaccccctccttgggagtagctgtcctcactgacatggtgtggtcatttttggcccttctccttagaaactgcttttcagagccagtgaaggagtctcagaaggaaactgtatcccagctgctgacacaccttgtttcagatccaaaacaatatttgcagatccatcacaatgacacagttcacttcaagtctcaaaaaccatgtatagagatttgcctctgaatggctctttgctgttgtccaaaacccacatctaccctttatggaaggaagtggtcaccactaaggttactggagaaagtgcaccacacctgaatgcagttcctcgcagacaatatcaaacatgttttagacttgggcagcacacacacgatctgttgataccatccttaaaggggctgtatttaagggaaggacattcatctgcgtttttcaaaataccaagttatatatgagtctcagggatttccgagtcaatttctaaacccccactctgtctacacccattcagcctcaccctctccctgactcctgttaaagtggctgtgtcaaaacagccacttcagaaagcccccagcatcacaactgccacctgggcatgactgggatatcatctgcttatcatccccgctcaggaaattatgtagattctgttactgccctccagacgcgacttgcttgtttggccgcctactcacagggtgaggctgcacagcagggcattttcaaagacatcatcaggagaagcaacaaaccaggatctcacttccatactgagaagataaaagaggaggcgacaaatagcatgtccaaatgccaccttctgaatcacttataattctgccaccaaactgaatagaaaatgccagacccaggttacatgggctcctcctttaggaaataggccatttgaaattttttcacaatctctgttcttacatgggctgtggaaaggtcatctgagacatcccaattatcacccttaatggtttccagtctgcactcatctgacctgatatccgtgatatgtgacacctccccacctccttcggcttcctgcatcccttttcagttgcacaaccccctcctgtgtcccagtctcatacgaccaacagatgtcccacttgcacttcatgctggagatgcacaaatgcgcgctcatccccgcccactacaggttgggctccctccgctgacaccttagttgctgtccctgtagcatcatgcactgagtcctctgggcacaaaacctcaactactcattgccactctctccttgtccctcacaaccagccacagggtcctggtgattctgcctcctctgtggctcccggccaccgcagccaactccctagcttgggcacttacagcctaagctcagggtcggctcccaccagactttctcttactgtcccttctcccaggatatccacttcacaggtctgtcatagattcatctccctcaaaggctgcttaaagcatttcccagaattttccatggctcccattgcctacgatgtaagtaccccagcccctctctgtcaatcaagggactcttcacatagcccccatttaaccttaccccttcagacgggtctctccactgctccctgcacacttactaatggggatcccacctcccccacagctggtttccacctggggcagtttctataaacaccctggtcctcctccccctcactcactcctccccaggagggacttaactgattggttagtttgggagaaaaaacggagcactcccagcccagcatttttctcttccctctttaccctgggagctgagcagcccattgggctcctccaggccatgcttccagaggtagtgctcccacagggaggcctgtggtgctcccatggggaggtctgtggtgctcccaggctacctgtgatgctgtcaggagcccccttccctgtcaatgtggcatgcatcctccaatatcagacttctcagtaataaaagtgatcatggttttggactcccaggtgccatattccttttgattcattctcaattagtgtagaaccccagggaagagaggagctcttgatagagtccttttacacaccaacaaccctggaactttgctgcctctgggtctggcacctctcattcctccctcccaggagcaccttcccctctcgctctgtctagttcttacccaccttcaagaccctcctaaagtccaatatcacctgaatgtgaaggtcctccctgggcccctgccacctcccctccctctgaactcacagttcctggctagactcatcacttggcaaccatgcaccgccacatcgtatttccggtaacttcatcctgcattctagtgcaggggtctcacctgtttacgttttggctccctggtaagttacacctgaggacaggttcattcccttcagcctcattatcatgcttcccctccacagcacctgcccagggtcttgctcaaggtaagctctgggtgactgtttaattttgctgctgacaatgcacaggcggcttcccaccttctcatctcagccctagacaatgtgaaggtccaaattatggcatcacggcaacattggcatggtcctttttaactcctaacactttgattgtggccttggacagtaactctacctgacagatggagaaatgatcataacgacttgagagattttcagagactctgttctctgacgacgtgtctatcctgtaccaaataactttgccttgaatagtgagtaaaatagaagaagacagcaaacacagagcacaggcatgctagctttgccttgcccatgagcctgcaggctccttaaggctaggccttatgttcttttcttctccctagtaccctagtagcatggatgctgtgtccaaggtaggtgctcaggaaacacttgttagctcaacttagttaacagtgggaacgatctccaaactctgacatcagggtcacctttgcttttgattatgtaatatggtattttgttacttgaggttaaagtttatgcttcagttgcagataaaataaagaagagggcgatacatctacaactagcttgttgggggcagctgtgtgaaagagagagcgcaagagtgagagagagaaagaaattaagagcaataaggccagtctttaaacaaagtaccattcacacgagcaaaattgttctcattacagttattttgccctcccctaagcctccatgagcactgaatgggtagaaatacctctttgattcaaggcaatggttggcgaagtaaaccatatgctcctggctggtgcaaggagctcagagagagcccattctaaccgagaacaaaggttcggggaaaagcagtttcccgcacaatgcagctgaatgattgacaggcagattattattaggctgagttggcctcatctggcctttttttaagtgcaatatggtctgcataacatgacatatgaatgctaaactcctggcaggtcctgcgaaggggacaatggagctggcagcctgacaccggtgcagctgggaggggaaggcttggtttctgcacattaacacatttgacatttggtatctaaagggaagggctaataaataacccgccaacgatgacactctgtaatgacagcttttactaccagccagttaatcctccactccagttctgtcctttcaggccatctggtgttgaattcttatttacttatttttattttcctgtagcttgaacttaggacatttgcctcctgccagtgtcacattttgaagtcaattcaagggccaggagggtggcagactgattgtggatgattccgcaccaaggtctgcagaaagtggagtgagtggagtttttaccaggtgaccttgggtttggggttcagctgcatgaaaccagttagtcatcttgggtccagagggatgggggaaattcacctcttcattaccacctctttctagaaacaatatgcatggtttctgcctcaatggatctgacatacattttctgagcatccactctgtgccccataaaaggatgtgttctagggatgttagtccatccctttaaggccaaagctgacagacaagaaggtgagccctcgcataataaatctgcataataggatctggactctaataggaagaagcataaagtgctagggggtgggagatgacgaagaaatcccttcttcctcagaggatttcaggaagttgcccagaattataaaggatctgaggttttaccctatttgcatgctaacaggttagctggcattatggactgaatgccccaaaattcgtatgtgaaattcccaacccccagtgtgatagtttttggatgtggggcctttgggaggtgcttaggtttagatgaggtcatgagggtcgggcccccatgatgagatcagggtcttcacaagaagagagaccaaagagctccctttctgtctctctctctctctctgtccctttctctctctctccatcatgcgaagacacagcaagaaggtggccatctgcaagccaagaaaagggccctcaccaggaacgaaccattctgggaccttgatcttggacttccagcctccagagctgagaaaagtaaatgtctgttgtttaagccacccaatctgtggtattctgcattggcagcccaagctgacgaagacagccagccacagtttcatgcatgttggcagaacacacaagacaccagggtcagagacaaaggactttactactcacagcattggcagtagccagaatatcagcttttgtatggattctccaagctcatttcccacagagtgacacaaagaaggccagatgacacctgcacacatggcaagttacattgcaagagagggaccctggagctagggaacccaaatctttcacagtgggcagtaaacatgccccatttttgcactggagaaagacactaactctgtctttagtcccttgtaaactcagacccatgacatcaagcgctgggtggaagagaaaatgagggttattcccttagtgaatatttgttgggtaagtgctcagggctgggtcctttgctgggagcagaaagaggaaaagacgttgctccaggtatcccagtgactggtgtggagagaaatacatgcagataactaagaatggtgtggaagggcagtgacaggctgggcacagaggatgacaggaagcacaaagaaaggcatctcctgtagcctgagatgatcagagatggggtgtccactggacaaacacccatgaaaagagaatggagaacgaggcagtgagtgcctctgttgacagatgtgcaaaaacacaagagacccatggagaattgtctcccagaagaggccaccaaatcaatggatatcagttcccaatcaaacgatttttataaaggccaagatgtgttcaaagaaggaaacagaaattttctcaaggttgtgtttctctgtggttgggctgtctataggacccccttaaaatacaacccacagtggcatttctggacaaactccctcagcttcctcatggaagaggggaagcggccatggaaaagcaggcggtgtgcggacaccgccatgactccatgtgcaggtgcatcagaagggagacaggaattggtattcaaggcccttcacgatgtggtccttgcccaactcccctgccttgtatctgggaactccctgtctcatacttcactttattttattttttattttatttatgtaagttttgaaacagagtctcactctgtcactcaggctggagtgcagtggcatgagcatggctcactgcagccttgacctcccagcctcaggtgatcctcccatctcagcctccagagtagctgggaccacaggtatgcaccaccacacctggtaaatttttataatttttgtcaagaaggggtttcgccatgttgcccaggctgggctcaaattcgtgggttcaagcaatccacctgccttggtctaccaaagtgctgggatgacaggcgtgagccaccactcccagccatgcctcatgctttgtactttgccatgatcctgattccgcaccttgctgtttctcccatccctttacgttttatcatgcagtgctctctgtctttcccaccccaaaactcagctcccttgactcacctgtgtcctttaggactgagctccaatactgtcacctgcaggcagtcctcctagatcacctcaggtgggagacacctttcttttgcttcctgccatcctctgcatccaccctgtcactgcccttccacaccattcttagttatctgggtgtatttctctctgcaccgactctgggatacctggagcaacgtcttttcctgtttgtgctcccagcgcaggacccagccctgagcagttacccaacaaatactcacacaaggaacaaccctcactttctcctccacccagcccttgacattatgagtcttggtctacaaaggtctaaggatccatcagcaaatgtgaaaattacagaagaaggtaaccatgtgccacagaaaactctgttattttcaaatagcccccaagggccatgagatagtgaaattgattttttccactactttattttcaccttcttcctctcctaaatgcaaacagcaactgcagcatcatctcactgtctctctctctctcttttcttctttttcctgcttcccttctcgtggcatgattatactagctgcatgcaatggtattgcacaacccctctggtagctaaaggtgccacccacctctgttctacagagaaaaatgaaaaatggaagatgctcgatgattagatggttccaaacctttgtctgtgttttgagaattggtagtgagcattcctgatagacacccctgagaatctgatgaagtacccagttccctcaaaatgcatatgcccatttacccacaaaatttcacagaccattgctgggagttcatacaagcctgtggtctccagcaataagaacacattttttaaaaacactaaacaagacacccacatattaaacccacatatgtttaattttctaagcttccatagcgatgaagcacactgtctcagaagagggccaggtcctgcagctcctgtcaagtgagccaaccgtgggatctaacaacggggactgaggagcagatggcatgtgactgtttgctgtggcctcactgcatgtgggtgataaataggcagagaagctatgagaatagttttcagtaatctttagaccaacgaaagttcagcccaacctggaaagtccgcattcattaattctacctcctcctgctcctggacacttcgatgtatgtctgccaccgccagttgtattgaatatgcaaaatggagtcagctgtgtcatacatacattcccccacctgtgcccacatcctgtgaggcacacggctttccctgaaattgaaacaaaagatgtgcagaaagaaggaaccaggtggattatattttgaatgtgtaacctgagttcagccctccaggctatctgttcttggagagccgtagccatctcttgttcatggctgcacttccagtcagcacctggcatataataagtgctcaacaaataaatgtccaggggataaatgcatgaatggacaacgtaaagcgcaccataaattcccagtgcccccacaatatcttttctctatgaaagcacagaaatttactgtatcccaaagcccgaaatccacctcaaattttcagcataaaagttctgcccttggctgggcatggtggctcacacctataatcccaaccacttgggaggctgaggtgggaggattgcttgagcccaagagttcaagaccagcctgagaaacatagcaagacccgatttctacaaaaaagtttaaaaacttagccaggcattgtggtgcaagcctgtagtcctagctactaaagaggctgaggcggaaggatcatttgagcccgggagttcaaggctacagtgagttatgacccattccagccctaggtgacagagcaagaccctttcccttaaaaaagaaaacaaaaacaaaaacaaaaacaaaattggtcaggcatggtggctcacggctgtaatcccagcactttgggaggtcaaggcgggtgggtcacctgaggtcaggagttcaagaccagcctggccaacacggtgaaaccctgtctctactacaaatacaaaaaattagcagagcgttgtggcgggtgcctgtaattccagctacttgggaggctgaggcagcagaatcgcttcaacccgggaggtggaggttgcagtgagccaagattgtgccattgcactccagcctgggcaacaagagtgaaacttcatctcaaaaaaagagaaagaaggaaagaaagaagaaagaaaaagaaagaaagaaagaaaattatctccccttacccccttttacccatgctctttctccttcaaacaaaggtgacacaaatgtttggagacagagtagaataaaacccattggaaggaagggaagatatctcaccaagtcctgatgccatcaatcatggtgctgattgaattgagcttgtatcctctttctggactcagtagactcctgtgcccagatgcaccccactcactgttccagtggagtcccctctgttcccataggcagccccaggacaggacaagcagtctggcatttgccctgtggatgtattttgcaaatgccatcacagggaccctcacaccaggccctccaacccgactgcagaactgcagccccactccaaccctgccctggggtctcctcgcgtggctgcgtctcccctctgctcaggaacaatgtcactgaggtctccttcctggcctccatatgggtactcctttgtatctgtcccccactccccacactccaggagcttggcaaattctgctggggagcccaggacccccaggccaccaaagccacactgaagttgtagggggggtcagagactagccccctttccaactccatcatctggttatgctacagtctcacatggtctctcgtggattcacctccctcagcctcttgccctgaccctgccctccaagaggcatcgtgctgcccattagcagggagcagggggaatcatggcaggaatatcaacgcttcacttctccccacttccccctctacatctcaggtgcctccaaactcctccttcctcttttaatccaaacaaccaagcgtggctgaataaccctctcgtaggagcaacctcttgcaaggtgggagcagtcacccatgtggcccacctaagaagctctggcggtctttgtgagagctgcttctaggagctataagatgtcactaaacagataactgcatccccagcttgaggttgaccgttatccccatctcttgtttgcctgattaaatcagattaaaatcaacatcaaaggctgcctgtggacacacgggaaaacagacggtcaacactttggttttttgatcatgaaaaatgagggaagacagcaaaggttccatgcccagaatctgcctcacattttcatttcattttgttttattttaacatgagctgaagcaattcccttgcgctctgtcccctaagccactaccagggacaggcagcgcagcaagaggtgagggcatgaggaggccaggcctggggctcctgatgctgtttcccagggacagtcctgtccttaactgcaaggagaaaaggcctcccacatccttaagagttcatggacaaaggactgtgttcgtgggttcttcccacgtggcagattacaatcagatatgcacagctagatcctgggtcagcagtggaaacagaaactcgcacgtttcagcccaaagagaaattacctcgttccattttaccaaagttcaagcaatctgtgcttgatataataggttgatgatagatagataggtagatagatagatagatagatagatagatagatagatagatggatagatcgatcgatctaatcgagctaaaaccataatgagctctggaattgcgtaaataattttaagaaaataaatctgtagaaactaatggtttctgtttcatttttgccctcaatcagcagccattctatttctctaagaaatgtgttttatttaagaggtccactactgtcaactataatctgttaaactatttctttttttttttgcacagcagatttgtcatgctttggttttatttttctgacgttttaatgtgtacttctgcaaatgaccaataaacaaactaagaaagatttggtgacaattttggcataaaactctgaaatggcttctcagcattggctctactggtatttgcagtctgctcattttttgttgtagggtagggggctgtcctatgattgtgggatgtttagaacatccctcacctgtacccacgagaggccagtggtacccccttgccagctgataaccaaaaatgtctccagacattgtcaagtgggaaacccccagctgagagccccagttctgaaatgatgaggctgtggaatggggaatctcagtcacccaaactgaaatttgggcaccaatatttctagactccctggaagttggaggacccacacgtgtgcctttccacgcaagccctgaacctgtgtggaaaatgggaaaacaaccattgtcttcatgagtaggtccttctgtacttttgtttatcacagcactattcccaatggcaaagtcatagaaccaatctaagaattcatcaataattggataaaaaatattgcatatatatatattccatatgtatgatatatatatatagtagatagatagatatagatataggccaggcatggtggctcacgcctataatcccagtactttgggaagctgagtggggcggattacctgaggttgggagttcaagaccagcctggccaacatgcagaaaccctgtctctactaaaaatacgaaattagccaggtgtggtggtgcatgcctgttatcccagctactcgggaggctgaggcaggagaatcgcttgaacctgggaggcagaggtttcggtgagccaagatcgtgccattgcactccagcctgggcaacaagagcaaaactccgtctcgaattaaaaaaaaaaagatatagatatagacaccatggaatactactcagccataaaaaagaatgaaatcatgtcttgcagcaacatggatggaacaggaggccgttattcctagtgcaatgactcagaaacagaaagccaaaaactgcaacttctcacttacaagtgggagctaaacaatggctacacacagacatacagagtggaataacacacattgcaaattccaaaggtgggagggtgggaagggggtgagggatgaaacaccatctgttagctacaatgtaccgtgttcgggtgatcctgcgctaaaagcccaggcctctccagtccataacatattcacataacacaattgcacttgtaaccctaaacccatttaagagttttaaataaaataaaataaaataataaaattcataaagtaaaaagcagagggttacaaaatgcaccaattctacgaaaagacagttatcaaaaagatttgaatctgtcatatggcaggcctcatcatgactgtacttttaacatgctgaagagctcaagaaatattttgagatgcctgtcttaactgtaatgtgatacaaaatatgtctttggtgtctattggtttcaaagtcacaggcactattcatattactgagctatgtggcctatgtgcgtcattcaagaaaatcctcgatttcagttagagggatagttgaaattaaaatgcaagttctcagaccaagttcgcacacctcctgaattctgaggcctttaaattccagtggcttccatgtcccaaggcaggagctcttcttccctcaccacgggggctggctggtgccccatgctagccagttggaagcccctccctggagacctagtgagttttccagggataggcacttgacctggaccagaccaatcagggtcctttctggaactttctgacaaatttcttaacgtagatcctctctttgcacaggggatattgtgagtgtgtttatttatttttaattatgagctccgtgctccagagcagcttagaggaatggaggtgggaagcaggtgcctcaaaattctagtctatctgggcaaggcacagtggctcacacctgtaatcccagccctttgggaggcagaggcaggtggataccttgaggtcaggagttcgagaccagcctggccaacatggtgaagccttgtctctactaaaaatacaaaaattagctgggcatggtgacacatgcatgtagtcccagctactcaggaggctgaggtgggaggatcgcttgaacctggttggaggaggttgcagtgagctgagattgttccactgcactccagcctgggcaacagagtgagactccatcttaaaaaaaaaaaaaattcttgtctgtctgtgatggttacttttatgtgtcagcttgactgggccatgggggtgtccagatatttggtaaaacgctatctgggcatgtctgtgagagtgttctggaggggattaccatttgaactggtacactgagtaaagcagattgccacctccgtgtgggtgggcctcgtccaacctgttgaaggactgaatggaaaaaaaggcggaataaaggagaatttgctctctctccctgcctatcttcaagctgagacatttggtcctctccagtctttagactgaaactcagactggaactcacaccatcagctctaccacctcttaggtcttaggacttaggtctcagctctcctggttcccagcttgctgcctgcagatcttggggcttctcaactcccataactgagtgagctaatgtctttttttttttttttttttgaggcagagtctctctctgttgcccaggctggagtgcagtggcacaatctcggctcactgcaacctcccagattcaagcaattcacctgcctcagcatcccaagtagttgggactacaggtgcatgccactgtgcccagctaatttttgtatttttgtagagatggggttttgccacgttggccaggctggtcttgatctcctgacctcaaatgatccgcccgccttggcctcccaaagtgctgggattacaggcatgagccaccacgcctggccaagctaatgtcttataataaattcccttagagatagattgatgattaatagagagataggtcggatagatagataattgattgacaggtagttaggtagattgatagaaagataggcatcctattgattctgtttctctggggtgccctaacacacagtctaaacctaaagtccatggttcacacgtgtttgtataagatgcagtatacacacacagaaagtttacatttttcccaatgtacaagcctgtcattaatattttaatctcaggacagcaggattaaaaaaaaataaagacctattgagaataacagaacctattgtacgaaatgaactgatacgggtttattacatggtaaatacatagtcccataaactgagtataacctaccaagtagttctgaagttcagttccgatccctcgggatagcttctggaaagaaggaaattttgaagccaagcaccttcttcacaatgtctgtccttattaggtcaaaaagacattaccctttggtagttccttatgtcatgctatcacatttattatccccagagctgtagctgtctgaggttttgctacctatttcctacccacccacgtggggctgacatttagacattcactgcccatctatagttcttgcatgatacatggatttgaatctccgcatctgaccaccggttccagccatgccaagcagataatgaacccaaggatccaagaagaaaggttttttaatggattcaatatttctggttcacttgtagcatctgggaaaaggtctcaggatccctgaggctgaaactgaatattttgagcaactatgcactaatgaaataatcaaatcaaaattagaactatttagatcatttctgtagagaccgtctgcctgctctctgatgaaagcacagcagaggaaaagtttccttgtaacttcctcccttttcattttgagggtgggaagcatgtttcaaagacccattagagctttaaatcaaggaaagataaaagaatccacacctgaattctaggagggctcattccagacacagagctgttttctccaccagcacttcatggttggccccaaacaggcttcagttgtttttagtgccttgtgcatctaattccaaagaaatggctattttatttggcttttattctattactcatgcagtgcaacatgtctgtgcaaccacacatccaagaaagtgaaatataagagattaaaaacagatctgtctagtgaacaggtgtcaagcattatctaatagcaaactaaatataaaaacggagcctaattagagttctggcatctctcctgctgtgggcttcacagctctttaactcttgaagttgcttctcagatcaaagaccagaattcatcaacaaagggaggctgtgatttctgtatttaggagggtgtgcacgtgcatgtgcacatatgggaagggaaggaaagagggcctgggaaggggcagttttgccaggcagtgccaaagagtgagctacactgatgagaagttgcttttctatcaaaggcattgaatgagaataaaaataaaattaaaataaattttaaaaaagaaattgcttttcctgaaaaagacttctagacacttgttcctcaaagtgtgttccttcccgggtgtgtatcaaaaatgagaataagaatttaccagcgactcttttggcagagacctgggcacactggccagcagagagctgggacctgttagtgcagagaaggcagggtccatgctgccaccgcctcccctcgggtgctgttgccccgggcccgaagcactaggcagtctgcccggttctgcccatggcttctgctccagaggagcccagcagggatactcacagtggaagagtgaggggctgtccctgaggaggccctggctgctgccccaagtggcactgtctcccaaaggctttggaggccccagagggcaaaggggccgaagacccagctttgaatgtagttgagagattcttggaacagtgatgcttgttacagaagaatttactgggaattgaaaaggtggctttagtccatatgttattagcctgagatgataaggagttttaaccagtggaccccatggtatggcatgggcctgggcaacagagtgaggctctgtctaaaaaaaaaaaaaaagaaagaaagaaagaaatacagtcgtgggcaccatcccagaggcactgagtcagaacgtgtatttctaagcactgattgccagttgattcatatgcacattaaggtcacaaaagtgtgtttcaggaattggaatggattggattgggatttgcagcaaggcgggcatggggtcaggctaaagtaggcgtttttctcatggtatggaaaaaattcccaacgggaacatattttatatggatttgcatatttaacaaatgtttgtaaaagcctatatctgcgcttttaacaggtttaggtattttagggtagggtgtggaatagatttccaagacaggagccctgatttataccgtcgtgctgtggaaaaggattgacttgccttcattattcaggaccaactggagtgggagttggggctacctttgcttacatgctccctcttacttcttccatttgaatcctgttacacttgggttgaaaaaaatcataaaatattttgccttgaaaacagaaaaaaaaatttaaaaaaaagaaaaggaactaaaaaagagggtggcctcagaccacagaatgccctagcagcttgttagaaatacagtcttggggccgggcgtggtggctcatgcctgtaatcccagcactttgagagggggaggcaggcagatcacctgaggtcaggagttcgagaccagcctggccaacctggtaaaaccccgcctctactaaaaatacaaaaattagccaggcatggtgacacgcacctgtaatcccagcttctctggaggctgaggcaggagaatcccttgaatccaggaggcggaggttgcagtgagctgaaatcactactgcactccagcctgggcaacagagcgagactctgtctcaaaaaaacaaaaacaaacacaaacaaacaaacaaaaaaagaaatacagtcttgggcaccatcccagaggcactgagtcagaacctatatttctaagcactgactgccagttgattcatatgcacattaaggttacaaaagtgtgtttcaagaattggaatcgattggattggggtttgcagcaaggcgggaatagggctgggctaaagttttcctgaagaggcagatttgagtgggatactcggcagttgcctgaggctgaggtcagcaagcttttcctgtaaaggtccagacaataaatacgtaggctttgcaggtcatacagcttctgtcgcaactagtcaactatatcactgtagcgcaaaagcagccacagacataatgtaaacaagtaggcatggccatattccaataaaactttatttgcaaaaacaggcgctgggtccagtttggctcatggggagtagtttgctgacccctggcccaagagaacaagtgtgtcttcataaagtgtggaacattctagatcaattgtgggttgggttgtacctggtcccaagactcaagctctcactagcttctgaagccagctctgttaatggaacagaatactttatatcaaggctttttcttttttttttttttttgagacggagtctcactctgttgcccaggctggagtgcagaggtgcaatcttggctcactgcaagctccacctcctgggttcatgccattctcctgcctcagcctcccgagtagctgggactacaggcatctgccaccatgctcggctaatttttttgtatttttttttagtagagacagagtttcactgtgttagccaggatggtctcgatctcctgacctcgtgattcgcctgccttggcctcccaaagtgcttggattacaggcgtgagccaccgtgccccgcccaaggctttttctttaaaaattaaggagatgtgatgtagttctattcctcaaccatgctccttattctgaaaaatgttcaaaactcaggttactgtacacttagagcactcctaattatctactgcttaaaactctcctaattatcttttgataaccctcaggaggcaggagaaccagaggatgacgaagtcaacctacctgtgcctctcagtcccttttgccttgctataaaggaatacctgaggctgggtaatttataaagaaaagaggtatattttggcttatagttctgtgggctgtgcaggagacatggcgccagcatctgctcctggtgaggcctcaggaagtttacaattgtggcggaaggtgaaggaagagcagtcatggtgagagagggagaaagaaagagaggggacaggtatcagattatttttaataagcagagctcacatgaactcattgctgctgggagggcactagccactcatggggatccgcccctatgaccaaaacacttcccaccaggccccacctccaacatcggagccgaccccgagacagaggataaatagaggaaccaggtggaaaaaaaacaaaatacactgaaagtctgtttacagactggtggaatccttatattcgtcccccacttaccctcagaacttcggaaggcaatttaataaacttttctcttgagattttaaaagccccaaaataaagacctccagtattgacattttgggatccccagttgtcccccaaggctacaatgacatctacccatcaaaaagttccttgcaggctgggcacagtagctcatgcctataatcccaacactttgggaggccgaggcgggaagatcacctgaaaccaggagtttgagaccagcctgagcaatatagtgagcccctgtttctacataaaatttaaaaattaccctggcatgcacctgtagtcccggctacttgggaggctgaggcaggagaatcacttgagcctaggagttcaaggttgcagtggagctatgatcatgccattgcactccagcctgggtgacagagcgagaccctgtctctaaataaataaataaaatttaaactaaaaaaattttttaaaaaaatccttgcaacacaggaaatgtcctttcaactttgcgttacctttcttaaatataaatagaaagccgagtattagctgatattcaaggaaggccatcaaaattaaaggcatatacccaaacatacaaatcaggaataaagaaaccctgaggccaggtgcaatggctcatgcctgtaatctcagcactttaggagaccaaggaatgtggatcacttgaacctaggagtttaagaccaacctgggaaacatggcgagacgttgtctctacaaacaattaaaaaattagctgggcgtggtgatgcatgcctgtagtcccaactacttgggaggctgaggtgggaggatcacctgagcctggaggttgaggctgcagtgagccgtgactgtgccactgaactccaacctgggtgacagactgtgaccttgcctcaaaaaaagaaaaaaaacagaaaagaaaagaaaaaaagagctctgagttctagaaatttgttttaaacttcaaaggaaaaaaaatcattactatgaaagataagagtttgaattcatgaaacaagcacaagatgctatgtaaaacaattagaaaatagcaaagagctcttggaaatttctgtaatcaaaatacacataacataaaatgtaccatcttaaccatttctaagtgttcgagggtatcaagtacattcatattgttgtgcaaccatcaccaccaccttctatctccagaacgcttttcatcttgcaaagctgaaactttgtactgattaaacaataattccccattccacatccccccttggcaaaaaccattcaactttctatgtctataaagttaactactctggagactttacctaagtgaaatcagacagaatttgtctttttatgacacacttatatcacttagtacaatgtcttcaaggttcacccacgttgtagcatgtgtcagaattttcttccttttaaggctgaattaatattccatcatatgtatataccacagtttgcttatccattcacccactgatggacactttggttgtttctaccttttggctatcgtgaataatgctgctatgaacttgactatacaaatatttctttaagaccctgctttcaattatttggggtatatgcccagaagtggaactgctgggtaatatggtaattctatttttaaatttttgagaaatcaccatactgttttcttaaaaatttgtaatgtaatagaaaattttaaaagtaccccccaaataaagatgaaagaaaacattaagaaactcttccagaaagtagaacagagactagaaatataaaacagaaaagagaaaaaaaaaatgaggattgctccataaggtcaattatcctaagaggaactccagaaagaaggaatagaaaaaataaagaagaaaaaattattatctaaagaaatgcaagacatttaccctaaaacttaagaaaattagtttctaaaatgaaagggtcactaagagcttagtacaagtcatgatgaaatctcagaaccccagagataaagaaaagatattacagtttttagagagtgatgggaggaatcagtttacatgctaaggggtgaaactcagaatggtaccttacttctcaataccatccttgggagcttaaaaaaaaaaaaaaggtagtgttacttttaaaattctgcataaaaacacatttcccacctagcaatctatatctagctaaactatcaatcaagtgggataaaacattttttaaatgcttttttttttttttttttttttttgagatagggtctcactctgtcacccaggctggagtgcagtggcatgatcacagcttactgcctctaatttctgggctcaagtgatcctcccacttcagcctcctgagtagctgggactacaggaacatgccaccatgcccagctaattttttgtatttttttgtagagacaaggtttcactatgttgcccaggctggtcttggactcctgggctcaagtaatctgctgacctcagcctcccaaagtgctgggattacagatgtgagccactgtgcccagcccagcaaattttttgaagaatgggtgagcttataaatggaagacaaggcccaatcattagactcatggattcaatcctgtaagagagaggagcacaagaatgtctcaggaaggaagtaaagggcaggacaagaacaactagtccagctgaaggtgtagagaagccctagaagagaggtcagcaggaagaggatatgaatcaaatgaatcgacagacatattgcacatttgtaaaataacaagctgctgatggagcaattagaggggttcatagaaaatgaagcaaatgaaaaaaaggaaggccaggcacagtggctcacgcctgcaatcccagcactttgggaggctgaggtgggtggatcatgaggtccacagttcaagaccagcctggccaagatcatgaaaccccattgctactaaaactacaaaaattagccaggcaccgtggcaggcgcctgtaatcccagctactcaggaggctgaggcaggagaatcacttgaacctgggcagcagaggttgcagtgagccaagatcccgccaccgcactccagcctgggtgacagaatgagattccatctcagaaaaaaaagaaaaaagaaaaaaaggaagcaattattaactctggggaaaaaatccaaaggtacaagaaaggaaatagaaacatgtaattgctacactgaatgttgcaacttgacatgtaatttaggccagacacagtggttcatgcctgtaatcccacctcaggtgggtggatcacctgaggtcaggagaccagcctagccaacatggtgaaaccctgtctctatcaaaaatacaaaaattagccaggcatggtggcaggtgcctattgtcccagcaactcgggaggttgaggcaggagaatcgcttgggcttagaaggcagaggctgcagtgagccaagatcacgccaccgcactctagcctgggcgacagagcaagactctggctcaaacaaacaaacatgtaatttaaaacaacagcaaccctagactataactatcaacaatgaagaactggagttgaaggataaatggcatagcctcccattcattggatggccaattctaggaagtattctccattctccaccaaagtcctggcaagattgcctttgcctacctcagtgactttactaattacatccttataagaacttgtcctttttttttttttttttttttttttgagacagagtctcactctgtctcccaggctggagtgcagtggctcgatctcggctcactgcaagctccgcctcccgagttcacaccactctcctgcctcagcctcctgagtagctgggactacaggcgcctgccaccacgcccggctaattttttgtatttttagtagagacggggtttcaccgtgttagccagggtggtctcaaactcctgaccttgtgatctgcccgctcggcctcccaaagtgctgggactacaggcgaattcatccttcttatctgtctcattctccctgctccctcattcctagtttctgggatcatattgcagatagagcacctgcaatgaaaacaaaccccattttcatttttcccccacccctacttaaatccagcctgcacagcctcaccatttgaataaaatctaagacaaatccaatgatctctgtgtgtgttttgggggtggagagggtctttattaagtaatttaaaagcttcttggccatctaaaataagaaaaaatgacttgtttcagtgttaaaatctccagatctacctaatgatatgtattttacttaaatttagagctccaccttctctgactgtcccattctgggccggttggctgcctgagggggttggcagctcagccttgcgttttctgctttctactctcagcttgttaagcaaggttgctggccccttcaggatgggagaaaggagaggtaaggttcaagggagcaagaaaggtcagatttgccataagatggccaagctgcttctgggctggataggggggtttgagagaccccccccattccagtcgttcttggggtttttctcacctgcaattctcttgatactggccaatgcctttccctggctggccactccttgttttcccttcagctcctgggaatccagtggtccccccatccactgtagtcaccaggtcctccaggccaaactcagaattcagatgacccctctcatgtggtcccatctgactcagtctcacttttagatttttttaagtgtgattcaggcaccacctaataggtctccacaggctcttggagacttgcatcagggacccctggaaacccctttccctaggctgggggtgaaggaaaagtattttccatcccttccatgtgtgttagggtgtatattgggtgaggggggattactctgacagctctctccaaaaggactcatctaatctccaactccctagacttctacagtctctttgtatagactggagccgggtggtcagttaagagcaaaatctcattattggattctccattgcaagtcctgcttggcggcctctttcctcactttgaaatgtgggattcatcagcctcttttgtcttggagttttagcttaaatggagggaaaaagcatcctattttaacatcctgttacacataatacacaacttggttcagcactaaataacatttacatggttgtaataatgtaaacactgaagactgatttaacaaaaaatgatgatggcaccgtaacgggagatgggcagaaggatgagagagccgcagcttcatctaccaagtgtgaaagtcaaggctctgaactgcaaacagcagactttccctgactaatgaaagcaggaaatgaggttattaaaggagatcaggtcactctccagcatcttaaggaacaatgcccagccacactgcgggctgctctgtgaatgccccgctgtctctagtgcccagcacccacactacacctgatacatcacaccactgatgcctgggaccatataccagaggctctacccgttcagtttcacaaacgccaaactgtgagccacccaccacggctgccagaagattccttcccctgcacgcccctttcctcatgggcttactttgggatcaaaatcttaataaggggcatctgattgatgaagtctaaattccacgcctgcgccccagctgtaatgtaatgacacatttttttatgacttctatcttgggaactcaggaaattaccagaatacgaggcgtgttcaaaaaatgttgagcttctacaagtaacaaatatctgcttcaggaagtcaacagataatgaggaaaatggataaatgcaaaaattgcagataagcatctcgtctagaaagataatgataaataccaaaagaaacagctcagggttgaaagtcctgaaaagaaggatgaggggagacgatggtgggtcaagggcagatgttttttacataagtcgttgggaaatgttaaatttttttataccatgcacatgtgataccctgataaatataaaactgagaaaggggtcactttcataagcatcagattttaaaggtactgcacctcaggtactgcagtccagctggcctggtacagccgcttgccaggatatctggcatgttgccatatcatgcattttctgctaatctgcctgcagctgtctacggtggaggggctgcagcctctcttgctaacagttcaacactggcataaatggggaaacagattggtttgttggaattttttggtttcttcttttctttttcttttttttttgggttatccaccataaatataaaggtcttgttgaaactttaaaaattataataccaagttcaccaaacatctattaatgcaggatattacattttacaaggctgcgctttcaaaaacagaccagagagtccagtggacctcttggcctcctgggcccggggtctacttcatgggcaagggatctgtgcaatggcataggggcctatgctcaagcttggtttaatgtttaatgcttggtattgctgtctggaaatccttaatgatgtttgaacaaggcacgctgcattttcatttggcactgggtcctgcaaaatatgtagccagtcctgcatggacctcaaagtccagcaccaaatgtaggcataaacacacaggtctcattagtcaagctttagtgtacttcttttctcctgcttcctcatctgcctttcgtctctctctctctctctgagactcttaacttggggactccacaaactgcagacaaacatttctgtggacatgtgaatgtgaataacatggtttggatctgtgtccccaccaaatctcttgtcgaattctaatccccagtgttgaaggtagggcctggtgggaggtgactggaccatgggggtggatttctaatgaatggtttagaaccatccccttggctctgatctcaggacaatgagtgagttctcatgagatctggttgtttaaaaatatgagacctcccccctctcttgcccttgcttctgctttggccatatgaggtgcctgctcccccttcaccttccaccatgattgtaagtttcctgaggctttcccagaagctgagcagatgccaacaccatgcttcctatacagcctacagaaccatgagccaattaaacctcttttctttataaattacccagtccaagctatttctttatagcaatatgagaatggactaatacagtgcatttttcgggaaagagtatctccttagcctttatcaggttctcaaaagtgctgtggcctccaaaatttgagaaccaccaatttacaggagctttggccttctagtttctctttaactactcagcataaatgtggatgtcatcctatgtcacctccaagccttattgatagcaggtggcacataaatgataactacatggagtgttcactgagtaggcggagccaggtccttgcatttctcatcaccaggtgtccctcccaaaggagaagactgcaccaaacagtgggcaaacctcctttgtttaaaatggctagaaatggtataatcactagtcaaactctctcctgagatcaaaaagcagttgcttgaaagcaaagttctcgcagtagctctctatctagaaggaggcattttatttatgtaaggaagtcacctaaaagaaaattcatttgttatggtgtggctttaagagttacttacttttaatggaatcccccagataataataaattctgaaaaaaaaaaatcagaatcatggcatgttaaaactggatacattcctagaaatagatggaaactgctcttgcaaaaagcttagcacatgttaaagcattttagaaacaatttgccaaagtttatttagtctagtgatttcgacaggttaaatggaccctttgagatcttttttcctcaagtacaaaggctcacttgcttaatgaacacagtcccagaaaagcagggggctgaaccttggctctaccatcttacctaagattctagagttagcaaagggtttccacaagcccaaattattatgtttaatcttttcaattatctgtgaagcattaggttggtgcaaaagtaactgcaggttttgacattaaaactggcaaaaactgcaataacttttgcaccaacataagaacactatccccattgttcaggtaaagaaattgatatggttttgctgtgttcccacccaaatctcaccttgaattgtagtccccataatcctcatgtgtgatgggaggggcccactgggaggtaattgaatcatgggggcggttaccctagtgctgctgttctcatcatagtgagtgagttctcatgagatccgatggttttttaaggggctttccccacttttgctcattcttctacttcctgccactacatgcagaaggacgtgtctgcttccccttccaccatgatggtaagtttcctgaggcctccgcaaccctgtggaactgtgagtcaattaaacctctttcctttacaaattacctagtcttgggtatgtctttatagcagcaggagaatggactaatacagaaatcaaaactcagagaagttgtataacatgctcaaggccaagaatgcagcaggatgaacagagttgttggactctgaatcaagtgctcctttcactaccagtgacagtgatgctttccccaaatagcttctctgcaaagtctctgctgaatggcttcatagggaggtgctggcactcacttcttagctgtgtgatcttaggcaagttacttaaccttttcttgcctgtttcttcatgcttacaatgggaataataataatctccatctcacagaattattgtgaggattaaatgagttgttatttgtacaaccgtattttaaaaggccctagcttatagtaggcaccatggtgttgtcattattaataatactattattacccttatagctcatcagtattggaaattacttgatttgcacacttggatacctagagaggctaaactcttcatctctagcagccatttgtgctgattttgtgagttgcctcaagtgtcctcatgcattttcaacagtcgagaagggcttcaggctgacggtgtgcatcagatgggatcagtgtattttaatgtgcctcctccccattgccccccatctgcatattgaacattgactttatgatgtcatgagcacaaaggtcccttgaaaattaaattcattgttcacttggaacagtgtcgggggagcaggaatgtttgtgctgacaactcggggcgttaacagtttcataactgtaagggagaagacaaatagtgtaacccactcattgttaatagaggcattaaaaggtggatggacttctattcctataaaggtgacttttaaattcatatgcaatctgctgcctttttatcacatcaccattcttgccttccttctgaccaaaccatgagtgtggggtttatcctcatctcctactcagcccattttcttctcttccattaataaaataaattctggaaaaaaaatactttcctgagtctgcctccgaaataactctcaggtcatcttgatagccctgtgccaagccagtcaccagtccacaaaagccaaccaataggcaagattttttctttttttccttgagatggagtcttgctctgtcgcccaggctggagggcagtggcgcgacatgagctcattgcaacatttgcctcccgggttcaagcaattctcctgtctcagcctcccatgtagctgagattacaggcatgtgtcaccatgcctggctaatttttatatttttagtagagatggggtttcaacatgttggtcaggctggtctcgaactcctgacctcaggtgatccacccaccttggcctcccaaagttctgggattacaggcgtgagccatcatccctgactgggcaggattattaattggagaaaggaggaaaggggaaacatgtaactgttccaccaaatcatgcctctctcttctttctctttctgaatttcaatcgggaaatgacatgcatcccctgccagctgtattacttaactgccacctcagacaccatctcctaatgataggctgtttcgggagatggctatcacctccttatgattctgtttccaagatcccaaaagacagattagctcagtgtcctccctgccaccactgagttacaatctgagagaaatcctaggcatgcaacccatgatggaagtcttaggagaggctctgttttgaactagagattagaaacttctcattggtagtttctggttcctctcactgaccattaggccagacatttccatgatggacttcataatcatgcaagctgcaatagcaaaaatagaatgaaaagaaaatgaccagaatgctgcatacaaagggcacagcccaaattacataattttgttcccatctgcattgagagaatcactgcatttttcagagactaaatatctaaaacccaagactccattttctcccctctcaggcctctccccaggcccataccctatctctcccctggcactctgattttgatgcaatgaatgcatttgagggactacatgataaataagaagtttttggtatgacagaaagtctaaaattaataatgcctttttaccagcagtgactatgggctgatgatgctactcgtgaaataaacctggtggagagaggcaggacagaggtgagttaagtcagagaggagaggtttacatcaaggcaacccagtatgctttttatttgaataactgggtggcttcctcttacgtaaagttgttactcagattaccaggagaatttgaagagtgtcaaatgcagcacaatcagaaggcatgactttaatgtgtcctgaaaacgcagtcatgcctccgtcctcctacttctcgtggttggcaggaacctgtagcagctcactgcctccatcctgtccctgaatgccctagactttgcattctcagctgcaagggtctacattttatccagccatgaagaatgctgtcaaagaaggagctggagaagtcagactctcacacctgcacctccaggagggctgaaactgaagggggaagtaggggtgctgctcaggtgtgccgtgactgaggacacaggacaggggcccttctgggtttggatgctggtgatccttctccagctgctgtttcaagagtgcatcaggtccccaggctttcacctattgatatggtttggctgtgtccccacccaaatctcaccttgaattataataatccccacatgtcaaggtgggggccaggtggagataattgaatcatgggggcagtttccctcatactgttctcaaggtagtgaaaaagtctaatgagagttgacggttttataagtgggagtttcccctgcacaagctctcttgctcatcacagtgtaagaagtccctttgctcttcctttgtcttcctccatgattgtgaggcctccccagccatgtggaactgtgagtccattaaacctctttcctttataaattacccagtctcgggtatatctttattagtagcatgagaacaggctaatacaattatcaagcttgtagaaaagaccagatcagataactggggctggggagcaactactttcaaacattgttgctgggagtgtgaattggtacaacctttaaggtgggcaactcagccatatctaaccaaattttaaaaaaatgcacataccctttggccatcccccttctggggtttaatcctgtagataggtttatacatatacaaaatataacattaccgagatattcactgaaatattatttggaaagagattggaaacaacccaaatgtccgtcactaaatggctgattgtatgaatgacaacacatagatagacaaaaggaaattaacactgttattaaaaagaagaatcagcactgtacgttctgacatagaattcactccatgataatataaagtaaaaaaagaaagtgcaaaatactgtgtataatatgctactctttggacaaagtgtactttatgtacatatatgcttgtttatgcacggaatacctctggaaatatccacaataaactgattaactacagttccttctagggaggagaaaccagtggctgggagatgggagaagagagtctttctgcactctgtacccttttctacctttcaacgtgtggatcatattcaagtgttaattttttgactgaaaaagaaattagctataaacagcattataaagactattaccaggaactcttctaacgttctcagggtcagaagtccaaaatcagtctcatgaggttaatgtcaaggtgtcagcaagtcttgttccttctggaatctctatgggacaagaggctccttgcattccttggcttgtggccacatcaccctgacctctgcttctgtgctcacatctcctctctgactctgaccctcctgactccctcttatcaagatccttgtggttacattgggatcttgggtaaaccgggataatgaacagattctgggaattctaggactgaatatctttgggggttcattattcagtctaccacagggggtatgggaggaaacactcctgttctctcttcattccatttcccctgtcccctaggaaaccagagtagacactctgacatccaccagccagtgctccccagtggagggattgctgtgttaaaggctgtggtccctcactcccatggtgcccacgcccttgaccccacaccccacctctcttctctgaggaacatagctatcaggtccaccttggaggccagaaacccccattctcagatgggacatgagaggatccaccacattcctcaggaggttgattcagagctccacatcttggcagttggtggggtctcatctagagagtgcattggacctagaaaattctgacaaagtcacttcctttggcaagaaccttggagaggcgagagctgggatgcagacgggttgcaagggtcccagtcaggaaggtttggtgctgcgctttccaaacttttatacatatgtatggttgactagtgatcttgttattatttttcttccatgagctcttgggttttaaaagctttttgtcttcttaaccatctacatttagtaagtagtagcctatatgttctaatcacagattaaggcataatttccattaaacttttaaaaatcttgaaaagaagcacacaactcccattaccatatttcaaaataaacccttgacagtctctggagtccagattggaaaacaaggatacagaaataacagcaatgacaatagcaatgttacctacagcacaaggagctctgggctgagggacaggatacctgcagcccggcccttgccctgccactcactcactgtgccaagctaagaaatgactcacctgcccagtgatcacaagccccagccccggagcctctggtttaactgggtcagggtgggattcccccaggtaagtccagtgtgagtcaagaccactggctggacagggtctagctgccccagagaacactccaggctgagtctcccggagccaaggggacaaactcaggactctgtgagagggagggcaatgggacggggacataagcaagccaagctgcacccagggcctgtgaatgttgacatcttgtgggctcaggccacctggtgaggctaagcaggagagtgcttggctgttctgacactgttcattaagccagggacagacagagactaacgtgatttaaaagcctccaaaagacacactgcaaatcagggtcacagcaagggccagccagcagccagctcaggcttgccctctctccctctcacccctcctttccccctgcactcaccttgtctgagccaaattgtttttccaccaaaatttacaggggtagcactgtggggaaacatttgggagagatctccggctgtgacccactgttaaaagcatctccactggctattgctaaacagaaaagattgtggcttcccagcaaggctgatttcccagaaaacagccctggtaggccaaggggtaggaacgcgaggtaagtgcttatctccatgtgctgatgttcactagggaagccagggacggtcaggatatctcaccccagctgaaatcagatgacaagctggtatccatctcagagggagctctagaggacaagcagaggcaggctgaacataggtatcttctttttgttgaaacacaaagatagccgctgcctttctttcttgccctcttactcataattttgtcctggagaggatcaggaggagcctccctggattattccaattagtcattagtcacttgtttctctggtatgggataatctggttctatgattacagtgacctagagtacctgaaccaaaaactgagaggcacattttagtaaaaattattttggtgggaggtttttcccactatttgtcattctatgaaaacaaaaagtttgcaggctagaatacaaaaatttagatcataacaaaaaggtctaacattctaagatgaatttctaacactctgtggtgccatcaccataagaagatgtgggggatgttagtggatgtggtggactaaagacctctaaaactcctctcctccataaaagcaacaaaaacactaaccaaaaaaaagtcagaatcaaatttttcagaaatttagaaattaaccaaaggcttgcaacaatctgaggtgcatttattcagtaacaatggctgaatcttggtaaaaaaatagaaagctttgtggtattttaatttgcctattcccatcccttacccgtacccccagatttgcagtactctggaaaaccaacagcccacaatcgcagtgaaaaatctcaaaaacctagtctgacagccactggaaggagaagaacagttctggagccccctcaaagttccatttccagagaactgtcatcattccacctgtctactttcctggaagaccccaccaacaatgctgtctttatgtgatgtgactcagagctcttccagtgcaaaaagccttttcttcagaggatatttgtctaaaacaaagcatcttgactgcctgaggcagtagatagcagttggggcaaataataggccaaccaaagagcttaaaaggaaaagctggagaatgacttgttcaaagagagcttttaaaagctctgatatattcctgttaatctaaaatgccacatatatgcataggacagtaggcatgcccagagctatatcatgcccaagaaagacctgagaagggctggctgactttgaagctctgtggaagcaggaagtaaaggctaaggcagagtttttaacttcttgactgaatgttaaaggtgggcccccaatacacatacagaacctctcagcaaaaattgggagacttattggttccacgtacttaagaaatatttgactaattattagtgtaccactaagccaaatgagcagagccttcaggggccacctatgacaaagaagacagactttacataattagttcagaaaaatcactgaacaaacatttacaaaacaaacagcaagaacaaaccctggagaggggtgaagatctgatttccagagttgtcatattatattatgtaaaaattccagtttttaataacaataaaaaattatgagacatacaaagaaacaaaaagtatgacccatacaggctgaaagaatcagtcaagaaaaactgttccaaaggaaaaactagatattagacatactagacaaggactttaaaccacctattttaaatatgtttaaagaactgaagacacatctaaagaactaaagtatgaaaatgatgtttcactatatagagaataccaataaagagacaaaaagaataaaaacgacccaaatagaaattctagagtggaaagtacaaaaactgaaatgaaaaaaaattcactcaacagcagacttgagctggcagaagaaagaaacaacatacttgaaaataagttgattgagattattcagtctgacttacagaaagaaaaaagaaggaagaaaatttaacagagcataaaagaccaacaaatacataattggaattccaaaagtagtgaagagagagaaaggatcagaaagaatagttgaagaagtaatggctgaaaactttccaaattggataaaatacatttacccacacatccaactagctcaacaaccttcaggtaggataaactcaaagagactcacacagagactcatcatgatccaactgtcaaaagataaaaagagaatcttgagagcagcaagacagtagagatccatcatgtataagggatcctcaagaatgttaactttctcatcagaatccatggaatcgggaaggcaaagggtgacatattcaaaattctgaaggaaaaaaaaacactatcaaccaataattttacattcagcaaaactatccttaaacatgaaggtgaaattaagacatcaagataaacaaataagctgggtgcagtggctcacacctgtaatcccagcactttgggaggctgaggcgggcggatcacaaggtcaggagatcgataccatcctggctaacatggtgaaatcccgtctctactaaaaatataaaaaattagccgggcatggtgttgggcgcctgtagtcccagctacttgggaggctgaggcaggaaaatggcatgaacccaggaggcggagcttgcagtgagccaagatcgggccactgcattctagcctaggcaacagagtgagactccatctcaaaaaaaaaaaaaaaaaaaaaaagataaacaaataatgaaagaatctgtcacttgcacctaaactacaagaaatactaaagggaatccttccagctgaagtgataagacacaaaatagtaactcatgaagaagcaaccacatgaagaaataaaaagcactggtgaagataactacgtagtaagtatgaaagacagaataaatgtattcttctttgtgttttactcttttttctccagatttaaaagacaactgcatgaagcaataattataagcctgtgttaacaagtaaacataatataaatatgcaatttggataataaaagcacaaaggagcagagaggaaatagagctataataaaaagagttttgtatgcctttttaagttaggttgttatgaatcctagcttgtcataaattaagatgttaaatgtaatccctagggcaacaaatacgaaaaaactaaaaaacatacagtaaaagaaggaacaaaggaactaagttggtacactagaacatggctgcttaacataaaagaagggaatagtggaggaataaaagaacaaaaaaagatataagacttacagaaaactaatatcgaaatggtagaaataaatcttatcagccactttgggaagctgaggctagtggatcacctgatgtcaggagttcaagaccagcctggccaacatggtgaaaccccgtctctattaaaaatacaaaaaacattagctgggtatggtagtgcgcacctgtaatcccagcttctagggaggctgaggcaagaaaattgctcgaacccgggaggcagaggttgcaatgagctgagatcgtgtcattgcactctagcctgggtgacagagtgagactctgtctcaaaaaaaaaaaaaaaaatcttatcagcaattacattaaacataaatggattcacattccaaccaaaagaaacagattggcagaactaattcttaaaaatgcattattcgggggctagcaagatggccgaataggaacagttccagtctgcagcacccagtgagactaacacagaaggcagatgatttctgcatttccaactgagatacccggttcatctccttgggactggttacacagtgggtgcagcccacagagggtgagcaaaagcagggtggggtgttgcctcacccgggaagtgcaagggattggggaagtccctcccctagccaagagaagccatgagggactgtgctgtgagagatggtgctatccagcccagatactatgcttttcccacggtcttcacaacctgcagaccagaagattcccttgggtgccataccaccagggccctgggtttcaagaacaaaactgggcagccatttgcgcagacacagagatagctgcagaagtcttttttcataccccagtggtgcctggaatgccagcaagacagaacggttcactccctggaaagagggctgaagccagggagctaagcggtctttcccagaggatcccacccccacagagcccaacgagctaagatccactggtgtgaaatcctctctgccagcacagcagtctgaagtcaacctgggatgctcaagcttggtgagggaaggggcatccaccattactgaggcttgagtaggtgatttccccctcacagtgtaaacaaagccttagggaagttcgaactgggcagagcccaccacagcacggcaaaaccactgtagccagactgcctctctagattcttcctctctgggcagggcatctctgaaagaaaggtagcagccccagtcaggtgcttatagataaaactcccatctccctgggacagaccacctgggggaaggggcggctgtgggtgcatcttcagcagacttaaacgttcctgcctgctgactctgaagagagcagtggatttcccaacacagcacttcagctctgctaagggacaggctgcctcctcaaatgggtccctgactcctatgcctcctgactgtgagacacctcccagcaggggtcaacagacacctcatacaggagagctccagctggcatctggagggtgtccctctgggacgaagcttccagaggaaggagcaagcagcaatctttgctgttctgcagcctccactggtgataccctggcaaacaggatctggagtggacctcctgcaaactccaccagacctgcagaagagggtcctgactgttagaaggaaaactaacaatcagaaagcaatagcatcaacatcaacaaaaaggacgcccacgcaaaaaccccatccgaaggtcaccaacatcaaagatcaaaggtagataaatccatgaagatgaggaaaaaccagcacaaaaaagctgaaaattccaaaagccagaatacttcttctcctccaaaagatcacaactcctcaccagcaaaggaacaaaactagatggagaatgagtttgacaaattgacagaagcaggcttcagaaagtgggtgataacaaactcctccgagctaaaagagcatcttctaacccaatccaaggaagctaagaaccttgataaaaggttacaggacttgctaactagaataaccagtttagagaagaacataaatgacatgatggagctgaaaaacacagcacaagaactttgtgaagcctaaacaagtatcaatagctgaatcgatcaagcagaagaaaggatatcagagattgaagatcaatttaatgaaataaagtgtgaagacaagattagagaaaaaataatgaaaagaaacaaacaaagcctccaagaaatatgggactatgtgaaaagaccaaacctacgtttgattggtgtacctgaaagtgatggggagaatggaaccaagttggaaaacatacttcaggaaattatccaagagaacttccccgacctagcaagataggccaacattcaaattcaggaaatacagagaaaaccagaaagatactcctcgagaagagcaacccgaagacacataatcaacagattcaccaaggttgaaatgaggaaaaaatgttaagggcaaccagaaagaaaggtcaagttacccagaaagggaaacccatcagaccaacaggagatctctctaaagaaaccctacaagccagaagagaatgggggccaatattcaacattcttaaagaaaagaattttcaacccagaattttgtatccagccaaactaagcttcataagtaaaggagaaataaaatcctttatagacaagcaaatgctgagggattttgtcaccaccaggcctgccttaccagagctcctgaaggaagcactaaatatggaaaggaaaaaccggtaccagccactgcaaaaacataccaaaatgtaaagaccatcaacactatgaagaaactccatcaactaatgggcaaaataaacaactagtggtccaggtgtggtggctcacacctgtaatcccagcattttgggaggccgaggcgggtggatcacgaggtcaggagttcaagaccaacctggccaagatggcaaaaccctatctctacgaataatacaaaaaaaaaaaaaaaaaagattagctagatgtggtggagggcacctgtaatctcagctactcaggaggctgaggcagagaactgcttgaacccaggaggtggaggttgcagtgagccaagatcatgccactgcactccagcctggacaacaagcaagactccaaaaaagaaaaaaaaagctagcatcataatgacagaatcaaattcacacataacaatattaaccttaaatgtaaatgggctaaacgtcccaattaaaagactcagactggcaaattggataaagagtcaagacccattggtgtgctgtattcaggagacacatctcacgtgcaaagacacatataggctcaaaactaagggatggaggaatatttaccaagcaaatggaaagaaaaaaaaaagcaggggttgcaatcctagtctttgataaaacagactttaaaccaacaaagatcaaaaaagacaaaaaagggcattacataatggtaaagggatcaatgcaacaagaaaagctaatgatctaaatatatatgcacccaatacaggagaacccagattcacaaagcaagtttttagagacctacaaagagacttagactcccaaacaataacagtgggagactttagcaccccactaacaatattagacagatcaacgagacagaaaattaacaaggatattcaggacttgaactcagctctggaccaaaaggacctaatagaaatctacagaactctccacaccaaatcaacagaatatacattgatctcagcacgacatagcacttactctacaattaaccacataattggaagtaaaactctcctcagcaaatgcaaaagaacaagaatcataaaaaacagtctctcagaccacagtgcaatcaaattagaaatcaggattaagaaactcactcaaaaccagccaggcgtggtggctcatgcctgtaatcccaacactttgggaggccaaggcgggcgggtcacgaggtcaggagatcaagaccatcctggctaacatggtgaaacctgtctctaataaaaatacaaaaaaattagccaggtgtggtggtgggcacctgtagtcccatctacttgggaggctaaaggaggagaacagtgtgaacctggcaggcggagcttgcttgcagtgagctgagattgcgctactgcactccagcctgggtgacagaacaagactccgtctcaaaaaaaaaaaaaaaaaaaagaaagaaagaaagaaactcactcaaaacctcacaactacaagggaactgagcaacctgctcctgaatgactactgggtaaataacaaaattaacgcagatataaagaagttctttgaaatcaatgagaaccaagacacaacataccagaatctctaggacacagctaaagcagtgtttagagggaaatttatagcactaaatgcccacatgagaacatgggaaagatcaagaactgacaccctaacatcatgattaaaagaactagagaagtaagaacaaacaaattcaaaagctagcagaagacaagaaataattaagatcagagcagaactgaaggagatagagacacaaaaaacccttaaaaaaaaatcaatgaatccaggagctggttttctgaaaagattaacaaaatagatggaacgccagccagagcaataaagaagaaaagagagaagaatcaaatagacacaataaaaaatgactaaggggatatcaccactgatcccacagaaatacaaactaccatcagagaatactataaacacatctacacaaataaaccagaaaatctagaagaaatggataaattcctgggcacatacaccctcccaagactaaaccaggaagaagtcgaatccctgaatagaccaataacaacttctgaaattgaggcagtgattaatagcttaccaaccaaaaaaaggccaagaccagatggattcacagccaaattctacctgaggtaaaagaggagctggtaccattccttctgaaactattccaaacaatagaaaaagaggaactcctccctaactcattttatgaggccagcatcatcctgataccaaaacctgacagagacacaacaaaaaaagaaaatttcaggccaatatccctgatgaacatcaatgcaaaaatcctcaacaaaataatggtcaaccaaatccagtagtatattaaaaacttacccactacaatcaagttggcttcatccctcggatgcaaggctggttcaacatacacaaatcaataaatgtaatccatcacataaacagaactaatgacaaaaaccagatgattatctcaatagatgcagaaaagcccttcaataaaattcaacttcccttcatgctaaaaactctcaataaattaggtattgatgggacatatttcaaaataataagagctatctatgacaaacccacagccaatatcatactgaatgggcaaaaactggaagcattccctttgaaaactggcacaagacagggatgccctctctcaccgctcctattcaacatagtgttggaagttctggccagggcaatcaggcaggagaaggaaataaaaggtattcaattaggaaaagaggaagtcaaattgtccctgtttgcagacgacatgactgtttatctagaaaaccccatcgtctcagcccaaaatctccttaagctgataagcaacttcagcaaagtctcaggatacaaaatcaatgtaaaaaaatcacaagcattcttatacaccagcaacagacaaacagagagccaaatcatgagtgaactcccattcacaattgcttcaaagagaataaaatacctaggaatccaacttacaagggatgtgaaggacctcttcaaggagaactacaaaccactactcaaggaaataaaagaggatacaaacaaatggaagaacattccatgctcatgggtaggaagaatcaatatcgtgaaaatggccatactgcccaaggtaatttacagattcaatgccatccccatcaagctaccaatgactttcttcacagaattggaaaaaactactttaaagttcatatggaaccaaaaaagagcctgcatcgccaagtcaaccctaagccaaaagaacaaagctggaggcatcacactacctgacttcaaactatactacaaggctacagtaaccaaaacagcatggtactggtaccaaaacagagatatagatcaatggaacagaacagagccctcagaaataacgccgcatacctacaactatctgatctttgacaaacctgagaaaaacaagcagtggggaaaggattccctatttaataaatggtgctgggaaaactggctagccatatgtagaaagctgaaactggatcccttccttacaccttatacaaaaatcaattcaagatggattaaagatttaaacgttagacctaaaaccataaaaaccctagaagaaaacctaggcattaccattcaggacataggcatgggcaaggacttcatgtccaaaacaccaaaagcaatggcaacaaaagacaaaattgacaaatgggatctaattaaactcaagagcttctgcacagcaaaagaaactactatcagagcgaacaggcaacctacaacatgggagaaaattttcgcaacctactcatctgacaaagggctaatatccagaatctacaatgaactcaaacaaatttacaagaaaaaaacaaacaaccccatcaaaaagtgggcgaaggacatgaacagacacttctcaaaagaagacatttatgcagccaaaaaacacatgaaaaaatgctcatcatcactggccatcagagaaatgcaaatcaaaaccactatgagatatcatctcacaccagttagaatggcaatcattaaaaagtcaggaaacaacaggtgctggagaggatgtggagaaataggaacacttttacactgttggtgggactgtaaactagttcaaccattgtggaagtcagtgtggcgattcctcagggatctagaactagaaataccatttgacccagccatcccattactgggtatatacccaaatgactataaatcatgctgctataaagacacatgcacacgtatgtttattgtggcattattcacaatagcaaagacttggaaccaacccaaatgtccaacaatgatagactggattaagaaaatgtggcacatatacaccatggaatactatgcagccataaaaaatgatgagttcatgtcctttgtagggacatggatgaaattggaaatcatcattctcagtaaactatcgcaagaacaaaaaaccaaacaccgcatattctcactcataggtgggaattgaacaatgagatcacatggacacatgaaggggaatatcacactctggggactgtggtggggtggggggagtggggagggatagcattgggagatatacctaaggctagatgacgagttagtgggtgcagcacaccagcatggcacatgtatacatatgtaactaacctgcacaatgtgcacatgtaccctaaaacttaaagtataataaaaaaaaaagaaaaaaaaaagtttttcataaaaaatgcattttttaatgctcaactatatgctgcctacaaaagacgcattttaaacttaatgacataaataggttgaaaataaaaggataggaaaatatataccattcatacaaaagagagttagagtggctatactaatatcagacaaaatggactttatacaaaaatcgttactagagacaaagaaggacattttatagtgataaaagtatcaatctatcagaaagaaacaacaattataaacatagaaggacctaaaaacagggcctcaaaatatataaagcaaaaactgacaaaatgggcagatatgaaagaataaatagacaagtcagcaataacagttggagactttcaaccacactttcaataatatagagaaaaactagacagaagatcaacaagaaagtagaagacttgaacagtactatgaaccaactagacctaatagacatctacagaacacttcagaatacatatttttctcaagcacacatgggatattttctaggataaactatattgccataagacaagtttcaataaatttaaattgattaaaaatacacaaaatatgttctccaaccataatgaaatgaaattagaaatcaatcacagaagaaaatttagacaattcacaaataggaaaacaacacaattctaaaaaaatcagtggctcaaaactaaaatcacaacagaagttggaaattgagcagattgaaaacaaaacacaacatatctatgggatgcaaataaagcagtgcttatagggaaatttatagttgtaagtgtctatatttacaaagtagaatgatcttaaatgaataaccactggctaccttaagaaactagaaaaagaactaaacccaaagcagaaaaaggaaggaaataataaatattagagacaaaataaacgaaatagagaatagaaagtaataaaaataaatcaataaaaccaaaaagtagaagttgataagatcaacaaaattgacaaatgtttctcaaaactgaacaagaaaaaaagaaaggattcaaataactaaaattagaaatgatatagggaatgttactactgaccttacagaaaaaaaaaataggattataacaaaaaacaatgggcaattgtacaccaaaaaatcagataacctagatgaaacggacatattcttagaaagataaaacaacctaaactgactcaaaaagaaacagaagtctgaatagagttataaaaaatacagagattgaattagtagggaaaaacattgcaaagaaaaggtcaggcccagatagcttcactggtgaattctaccaaaactttaaagaatacttgacgtcaattcttcacaaactcttccaaaaaatagaagagggagaacgtttcccaactcattctatgaagccagtattactctgatacccaaatcaaagacatcacaagagaagaaaattacatactaatatttattgtgcatatatgcaaacttctgaacatactattagtaaaccaaatccaacaacatatgaaaagatgtgtacactgtgaccaaatgagatttatcccagaaatgcaatatggattcaacataaaaaatcaagcaatgcaatatgtcatattaataaaggacaaaaccacatggtcatctcagtagacgtggaaagcatttgataaaatcaacatcctttcatgataaaaacactcaataaactagtaatagaagggaatttcctcaacctcataaagggcatctacaaaaaaagttaacatcgtctttttttgtttgtttgttttgttttatgagatgaagtctctctctgtcacccaggctggagtgcagtggcgccatcacggctcactgcaacctctgcctcccaggttcaagtgattctcctggctctgtctcctgagtagctgggattacaggcatgtgccaccagacctggctaatttttgtatttttagttgagacggggtttcactatgttggtcaggctagtcttgaactcttgacctagtgatccgcccacctcggcctcccaaagtgctgggattacaggcatgagccactgcacccagctattaatatcgcctttaatagtgaaaggcagtgctttctgcctatgatcaggaataaggaaagtatgtcccctctctgcatttctattcaacatttagtgggagattctagccagggcaacaggcaagaaagagaaataaaagacatccagattgaaaaggaagaagtaaaactctctagtggcagatggcatgattttgcatatagaaaatcctaaggaatacacacacacatgcacacacaccccaacctattagagctaataaacgagttcagcaaggttgcaggataaaagattaataaacaaagctcaattatatttttacacactacaatgaataatctgagaatgaaattaaaaagcaattccatttataatcaaaaagaataaaatgcttaggagtaaatttaacaaaaaaagtgcaaggctcgtacagtgaaaattataaaatattgttgaaagaaattaaggaaggctaaatagatgaaaagacacaatgtgttcatagattggaagacttaacattgttaagctggattatgaaaaaaaatcacctatatatgcttctagttttcatttttaagtatttaaatcttttattttcttttatttcagcacaagcaatctagtttttttttccaaatggctgccactaattctaatgttatgtattaaatgtatcttttcctcactgatttgaaatactgccctctaaattcccaaagtatttcttaattactatgtttcttagtcccttgggattcttacaaaacctgtgttaactggatatatgtcaaaaaaacaaatgagataaataagagaatggaaatattcacctaagggtaagtcagcaggaaagttcttcaaggacatagtcattttaaccaagtgctatgtctaaagttcagttagatggtctgcatctgcagcaggtgccaggcaaacaagcaagagggcaaggatctagggcaatctggggttttgtggccctcttactgtaaaatccttcccattagagttcttggatttttgcgagagcatggtggtttttaataagcgcataaccgaaagaaggctttgcacttcaaagcctgttgtaattacccgctgcattagtaaagtaagaccagttgcaacaagaactttaagtgtttcatggcatctctttgcagcaagacagcctttctgaaggtgactgcagacagacatggtcccgcatctttgccaaatacagaatcaactcagcatctcactgacactaattatcagcttgtgtttattcacatcacagaaaagagcttaatttacataatacatattggtcaattctttgcttttgaacttcacctttgcccatcagcggatcaatatgtatttaatcttctgttttagaactgattttaagactcacagtaagaggcccagatttcacaatcattaattgctattatcagccccttttcatttcctaaacatcagcaatttcttaaagttctgctttcattcctttattaagttatcccttcttgttcatcacttggttctactgtgtctttcaacaaagtacagagtttacaactagccaataatgtaaaacaaaagaatgctctgaaattttccattgattctccagtctatctgacctcatcaacaactgcatgcaaaactcaagtcgtctgaccatttcctgatggatgctatcaagtacttccaaagttccagataggtctgccaaagggtagaggactcagattcttcctttctctcttttaaataagaactgaattatcatctttggatggctaattattctatatattacagtgtaactggttgctccctaaattttcatattttcaagtatatcaaaatatactatactcctgactagcatcaggagaatctgccattccttcatcacctaattcaggcaagtcacttaatctctctgggtcttagtatcctcatctataaaatggattaacaatagagcatttttggaaattatacgataacctgaataatgtattttacacagagcctggctcccaggacaaataagggacttaaagcccaaatgaaggactgtcctgttaacagtattgctatcactgccatcacgtagactaaataaggggtagttactgaacggaagggagtcatctgactaaatggtcagttgtgttcctacctgcccgtatatttaccctcaactgattttcaacaagggagccaaattaattcaatggaaaaagaatattattttcaacaaattatgctggaacaacttggtatcaatcatgcaaaagaatgaagttggactcctatttcataccatatacaaaaatgaactcaaaatggataaagacctacaagtaagaaccaaaactcttacaagaaaacacaggggtaagtctttgtgagtttgaattagcaatggtttcttagatattacatcaaaagcacaaataacaaaagcaaaaatacacatatatgattgcatcaaaattaaaatattttgtgctttaaaggacttcatcaagagagtgaaaagacaacccacacaggctgggcgcagtggctcatgtctgtaatcctagcactttgggaggctgaggtgggcagaccacttgaggccaggagttcgagaccagcctggccaacacagtgaaacccccgtctctaacaaaaaatacaaaaattagccaggcatggtggtgcacacctgtagtcccagctactcgggaggctgaggcagagaatcccttgaacctgggaagtagaggttgcagtgagccaagattgcagcactgcactccagcctaggcgacacagcgagaccctgtctcgaaaaaaaaaaaaaaaagacaacccacaaaatgggggaaagttatttgcaaatcacatatctgataaagacttgtatctaggatataaagaattcctaaaattcaataataaaaagacaaataatctattacaaattggcaaaggatctgaacaaataaaccatgaagataatacaaatggtcaataaacacacatgaaaagatacccaacctcactagccatcagggaaatgccagtcacaaccacaatgcgatatcacgtcacacccactatgatggctagaatctaaaagacagataataagtgttggcaaggatgtggagaaatttgaacgctcatatgctgctggtgggaatgtaaactagtgcagctactttgaaaaacagtctagcaatgcctcaaagtgttaaacataagagttaataccagcactttgggaggccgaggcaggcagatcatgaggtcaggagagcgagaccatcctgataaacacggtgaaacctcgtctctactaaaaatacaaaaaattagccgggcgtggtggcgggcacctgtagtcccagctactcaggaggctgaggcgggagaatggcgtgaactcaggaggcggagcttgcagtgagccaagattgcgccactgcactccagcctgggcaaagagcaagactccgtctcaaaacaaaacaaaacaaaacaaaaaaaagagttaccatatgacccagcaacctctctgctgggtatattcccaaaggaaatgaaatcagcatcttgtagagacatctgcatgcccatgttcactgctgcattattcacagtaaccaagatatggaaacaacctaagcatctgtcaacagatgaatggataaagaaactgtggtatgtacatgtatgtatatatctatctctatctctatatatctatacctatagctatatatctagatatttctaggatctgagcaaatataccatgaagatctatatattcagatatagagatctatagatatatctagatatatagatatatgtgcataccacaatttctttatcattcatagatataaagatatatctatagatatagctatatagataaatatatgtgcctaccacaatatatgtatctatgtggtatgcataaatagatacacattatatatctttatattacatatatctttatattacatatataaagatatatatatctttagagtatccatcatttttaaggctgaataatatccattgtatactgaataacttccattgtatacagaataatattcattttgtgtatatatataattgaatattattcagcctttaaaaaatacaaatattattcatctttgtgacaacatacatgaacttggaggacatcatgctacgtgaaattaaccagacacagaaagaaaaatgctgcatgatctcacttatatgaagaaatttttaaagagtcaaatgcatagaaacaaagaattaaaactgtggttaccaggaaggtggaaggagagggaagaaatgaagagatataggtcaaaggagacaaagttgcagataggcaggatgaataaaacctagagacctaatgtacaacatgaggactatagttataatattatattgtatactggaagcttgctaagagagtagattttaggtgctctctacagggtattagagtgagcagagatggagaatcaatgggaacctgaaaatgatcattttacctggtccagctttgacatacacagtgaaattgtttctatttgaaaacaggaaaggcagtagtctaaattcacttaacctctatattctgggcaaacaaataattgtccagtttacaaaagagcaacaggtttctttaaataggccagtgtttaattgctttcctggatgaattccttgttttctgaataaaggcatgagtcaatgagttcaatgagttcagctcagttcagtgagcaccacagctctttgctatgtaaatgacctatttagaaatgaattgcatttctgaatttttctcagcagcagttgtttttaaccaaggtcttgcacatcaattgttctgtaatcttcagggttgggatggggagagaaacaaaagaaatagcaaattaattgtaccgtgtaatcgtaagaatctacactttgagggtttgccattttgttgataggaaaaaaaattgctatgtgcagtgatactgtaatcaaaatgacaagcaatggaaaaggaatttcaggcatactctcctgttttaagctgaagcacagagaataaagtacgtagcagccacggctttgattctggtcagaattactcaggtttcctctctacaattgcttaaccttggccatcaaattttgtgccacttcttatgctaccattgtgggcatatggaatcatcctcctgggagctgtaattcgtttcatcttatcttgcaggcaggggaccctgatttcattaccaaggttgtaggcacaaaatgggatggctagggttcacaatgacccccaccccaaccatggacttgttctgctcccactctgcccctggccatggcaaattgatccaaggaggaagacgctggactcaaactgagccaaaattaaaggggaacagaaagtaaaggatattctacaaacacctcaccaatactcctcaaaactgtccagtcatcaaaaacaaggaaagtctgagaaattctgtctagagaagcctcgggagatatgactactaaatgtaatgcagtgccctggatgggctcctggggcagaaaaatgatattaaataaaaactaaggaaatctgagtaaactgtggaatttaggtaataacaatgtgtcaacatccgttcattatttgtgacaaatgtaccatagcagtgttaacaataggggaaatagtacagggactctttctaatattcttgcaacttttcagtaaactgaaactattctaaaattataagttgatcaaaaagaaggaatcagagagaccagaggtggttggagcggagggttctggccccaccctagaaagcagtcctgatgctgaggatgctggagtggccccaattcctgctcagccttacggtctttctttgatcccatgagctccctcaatgtgcttcccatagtcctaatgcctaacgtgctgaagttacccaggaatgaaatctgttgcttgcaaccaaaggttcttaccagaagctctgcttctgagtccttaggaaagaggtagtgccagatctcaatttataaggcaatggttgggccatgatgtggtgtggatgtttgtcccctccaaatctcctgttgaaatataatccccaatgttgaaggtgggaccccctcatgactggcttagcagcatccatggtgatgagtgtgttctcactcggttcatgtgagaactgcttgtttaaaggagtctgagacctcccccttggctctctggctccctctctcatcatgtgacatgcaggctctgccgtgattggaagcttcctgaggcctcactagaagcccagcagatggccggcaccacacttcctgtacagcctacagaaccatgagccaagataaaacctcttttctttataaattacccagccttgggtattcctttatagcaacacaagaacggactaacagtaagctgtaatgcaaatcttattctgtaattttcataactttcctcagtaaacattttaccagagctcttgagacagaggagcacctatttcattctttcctctcctctcctcccagcatgggtctccacagagatgacccatgcccatggcagatatagctaattgatcacaacactcattccctgagcatgaatgcagaggagtagatgctgttggtattgctcccaggtcccttttatcactaagggcacccatttcctggctgctatgaatgccaatactggatactcacagctgcccccacctccacagaattgtcttcagcggaattggaggatcttcacctgaggcggccagcaaccaataactgactaataaagtccagccctcttgcctcgaagtgggtacaactctgaggtgtgatttatgctctacaggcctgcatgggattaagctgaaattgggctgcagctgagaccacatccctacatagctccttcccctgccctatctggttgccctcactcccttcctccaaagagcccctttcaataaacccagtgcatctgaatccttgcctgaggttctgcttcagggaacccaacacagtgactctggcagccactaccaccaatacataagtgttgacacatgaggtgaaacctatttgacatctctactaggaaaaatacgaacaaatgggagaaattgtgccagcaaaaaaggaaacatcaacaaagaagctagaagcctatttaaccactggcccctgcaaaggccaaggcgagtgtatagcctgcacgttctctgtggagacaccgcgttcaggcacggtttgagacctgcccaccatcatccatcattggactgcctgtcctcaacccaccatggagaacaagcttttctaagggaaggacatctgcaggataaaatgggaaaagaggaaggtaaagagggacagctcttacttccaggagctgtcctgtctgatctcggaaggcatttctccttccctttgaagagtgtcctggagaagaagcaggctcactgtctcaagagcccccctgcaagtggcatcagagaactctcacgcagttgggcatttttattactaaatataacctggcctttttttctctgctattgtttaatgccaactgtgttttatttaaaataaaaaaaagagtgggccgggtacggtggctcacgcctgtaatcccagcactttgggagtccgaggtgggtggatcacgagatcaggagatcgagaccatcctggctaacacggtgaaaccccgtctctactaaaaaaaaaaaaatacaaaaaaattagccaggcgtggtggcgagcacctgtggtctcagctactcgggaggctgaggcaggagaacggcgtgaacccgggaggtggagcttgcagtgagctaagatcgcaccaccgcactccaacctgggtgacagagcaagattccctctcaacaacaacaaaaaaaagagtgtacttgggcaggaaatgtgtatgtgagactgatgaaacagaaacccaaaataacactggtcaaaaaaataaattcaaaatctatttatctatttctgtcttatgtagaagtccaggctagtatggcagctcaatggcatagctcttgagagggtacagattcctcctcatgttgctttgccatctccagagcatcactcttgtctggtgagtccagcgtggttcatcattgcatctggacttcagccagcagcaagtgggaacaggtaaaggggtggatatgccccttccttttaagggcatgacctggatcacacatcatcttaaggctatatttccattcaccaaaaagttaaatacacagccacatctacctgcaagggaggctggcagatggagggtttaacttgggagccatgagtccagctaccaatggactgttctattgctatgagtgaaaagagaatggatatgggggtacagtttgcagggcaatgagatatcaggaatgcaggcaagggtttgagagcagtgataccttcttagggaaactgggctgacttgagggtctcagacaccccaattcattgcctccattggattgtattactgttcccccaaattctactttcctctcatggtgcaacaccccccacccccgccctgtaaaaatcaacttgcttcagccaatgagatgtgggcagaagtgacgtgtgttgctttcagaagaaagctataaaggccaggccatgattcatggtctctttcttctctttgccacaaaaccagcaatgttccagacaggctgttccatcagccttggaactgcagatgatgtgggcagaaccaagcctgcctgagagggtcatgcagcatgagagagaaacaaaccttgatgctgctgcaagcccctgaggttgccaggttgctgatgtgttagcacagcataactcagcctggcctgccaggtacagtcccatgtccgcctgccagtgaatccacagtggagtccatgtccaaaaagtacagccaattgccatagcttaatagtactaatggctgcctttcactgaacacttacaatgggctaagccttaataattttagtaacattaaagaaatcatttaagcttcatttggagttgataagcaaattacagatagttcctaatgctttcatttcataattgatcactgaaatgcacatgggtaactggtatttgaaacaactctaatgagtccttttataaaataagagtctttgaggacgaagccctgcccctaaatatatcttatgagtttagcattttacaaattgcaaaattgtagaattatattcctgatgattaggaaaaatgatcattttaattattttattgttaacatactattagatggacagctaggatactctgactgtgagtaggggaggaaccaaccagaagtagctaaaaggctaaggatagtcttaacagacccaatcagaagtacagaggcagggaagcttcaggcttggttcagtggctctatggtgtcattaaggacccagatgctctccatctttctgccctgtaatccctgtgtcagtaatgcctccccttatggttacaaggaagctgccatagccccaagtaccatatctatataatatgtcaacatctggcaaaaggagaggggagaatggcagtgtctccacactcatctcttcttctaaggcagaaaagccattttctaaagccccatcatagatttcacccaacccctgtgtcacatgaacactttgcccatgcctagccgcaagcaagacaaagaaggcaaatttcttgtaagaatccacatggctaaattagttaggataggataggttgtgctgcagtgacaataaccccccaaatctcagtgactttatacaacttaggtttgttccacatattcatactacaagtccaagaagtctctcagggatccaggatacaccatttttaatgtgaggcctccccatttcctacagcaggggatgagacagctacagggtcatacaccagcttttctttacttcagtctggaaataatttatgttccttctacccactttaatcataacttgctccatgaccccaccctgctgtaagtgctagacgatgcacagggacagatgaaattctgtctctgctatgctggcttttccccactatcaccattccctctctgttatccctttgccccttcctcaatcaacccccaataccatcacctctatgcccttgtttgtgtggtccatgtcactcctcccttcctcagaactctgtgggtcccaagcccttcttgtatctttgtgactgtaccactctagtgacttctgtaagtcaaaagcattctttcctctgcctgttgctgctgtcaagaagagggaggggtgattttggggaaccatgaatagaggaaaaaggacatcagaaattcctgttccaatgtacaattcgacgtttgtcaaagtgtctaaataatcattccaacctcacagtgtgaggatttgtttcttgggggaaaaaaaaatacctcttttagttttacataagagatacggattccacctaacataacattgtctttagaatttcaattgtgtaagaaaaaaattatatatgtgtactgggaaaaaatcttagcaaaatattaacagcatttacacctgtgcaatgggattatgagtaacttattttcttcttaacatacaaatgccatgcttcaatagtgggggaagaactattttaaagaagttaagctttttcatccccaaggtatcacttctctacacttgctttccgtccgaccttgagaagttaattcccagcacaaataccaagtattattattattaggggttagttttctggtggggaggcaggagctagggacaaggggaaggatattttacctgaacttaaagtggaaagcatttatgcaatttttcattcccaggagcaatcttccagctggactaaaaattcctcggaacctagctgatactgataaggtttgacagaaaataaaatcccaatcattttcacccagaaatgttgagcagaaaactgaagtgagaaaagaatttctatcaccaaaagctttcttgtgctgctctttgttatttataagattctcaccatgaaaggttccccacgaaggtgccatcgcaaccaggtatgtgcgagccgcctcggaagaaaaatggattctttgactgactgtgagccataggaggcttttataatattctgaccacagaagagccacgagaaagaaaacagaacgggaaaagggctcagcatgagttccacccttaggtttggtattttctgttgctgcttttaaacaaaggaagctcaaactctatttagccctctgaggaagaaaagtgctacgggattggcacattaattacatgccaaggacattttcctaaggagaaaatctttggtggtttcaaagaaaaatacactgctgttgactgaaaggggctgctgggttattcctgatcacctttcctgaaccacagacatctttttcttctgggtactattgaaacaaaagaagttataaataaataagtaggcatccttaaagcagaattccatttgagttgttgggaattacgtacaaatacgcagtccaggtctgtgggggacacaatgatgtcaatgtcacagtgctgcgaacgttgcatcgcattgctgcaatgttggttctggagacagcagaaccaacatcaaccaattacatgatgcatggactgaacctctgtgtcccttaaattcatacgttaaaacctaatccccaacatggtggtactggaatgtctctggacaggtgattaggtcacgaaggtgaagccctcacgaatgggattagtgtccttgtaaggagctaaagagaggagagttgtcccttccgccacatgagtacccagcaagaagatgccatctaggaaccaagagcagctgccaccagatgccaaacctacggggccttgttcttggacttcccagcctccagaactgtgagaactaaatttctcacagttgttgtttataagccacccagttggtggtattttcttatagcagccaaaacaaactaagaccgtgaccctgggcaaaatcaagggatacagccagacttggtttcttctccatctacaggatggtgataataatagcacacaaaaatgttgtcacgattaaataagacttggatgtacaatatatgttgctacacttacttgtatttatacatgaatgccctggtctttgtacacaaacatctgtgtctgcaatggactgccacagacactgacgcccaaaagatgtggttttggtttttttaaagtacctactcaaggaaattagtccagcctcccttctcagtgaactcgtactgcagagcgtatttgcatccctctcccttggattcatttatttgcagtttatttttctagcagtcactacaatccccataatacaggaagtctcattcatggctcatgtctgggagacttgacagatgctgcttaaatatttagaaatttctctttaaagaaagcagctgaaaccgaagcctgtcaagctgttaaaatgtggccctattcctcaagttcacatttaaatgttaagattatatttggctttcagcgtttctagagagaccgtagtgatttttatatgtatattttttcagagtcaacatagatggcacttactttttcataactttcatatacaatgtcatgactgaaaactaaacatgtaactgactgttcactttcagtttaagtaaatcatttggtgtggttattacgaaagtagaacttcaaattcttttccatccaaagaaaacacaattaaaatccgagcaacattccagtggagtactgctttatttgaagaagcaaaatgtctagctgacaataaaaaaaaaaaaaaaaaactcaagaaagcaacagagccaactgtcaaggatgtgaccccaaatggtaacttaagtgtcatcgttcttatgattctgtctcagtgaagatggtgtggcagggtgatgggctacatcctatttccctttccttggaaggaacatggagttcctgagaatttaggaagacttggagccagctacctcggccttgttgcctgtctgctagaccagactgtctgaagcagagatgtaagaaattaaacatcagagaaggaactagggcttctcaggctgggtttctgacattctttcctcccctggcaggtgtaataaaagacacacatgtcaacccttaacagctcagaggcaaagcggtaacatttcactataaagagcacaattatggaaaactgccttatcgagctattttcttgtcccacagaagactcaaagaaattcttctgtgttgctctcttgacaatttcataccagaaaggattttgggttttttgttgttgttgttgttgttgagacggagttcgctctgtcgcccaggctggagtgcagtggcgccatctcggctcactgcaagctccgcctcccgggttcacgccactctcctgcctcagcctcccgagtagctgggactacaggcgcccgccaccacgcccggctatatttttgtgtgtttttagtagagacggggtttcactgtgttagccaggatggtctcgatctcctgacctcgtgatccacccgcctcagcctcccaaagtgctgggattacaggcgcgagccatcgcgcccggccagaaaggatttttacagcagcaagaagcagcctgagagcgattgaattttccaatataaacctgaatccacatcaggaggagggatgataaggctccatggcctgtcactttccaaagatgcctggatatggccatttcggaaggtgaaagccagtgcctgtttcctcatcatattcttctactgagtaaaatagataatcttaggtataaatatacatcatttttttcatggcatttaatataattatttcattttggttggggaaaaaggtcatagcccataagtatattttcttcatctgaattagactgtacttaaaaaaaaaagaaaaagtttttgagtgctggagcacagcaaaaatgtctctgctccctgtttgtaaaatggtcactctgtgattaaaagcctccttctaaatgtgacttcttgtctgtattcttgaatgtagacagtatttagccagtgaatcattagtcatttttttccccacaaatatgattgagcacctgctatgtggaaggtcctgtgctgggcttatcaaaaagaatgtccctatccctgccctccagaagctcccagtgttgtgggactctgatggatggacaggggtagtgaagactcagacatggtggggccatgtcgaactggtaatgttttaaaacacttctttcagcaaaagtgtagccagactcctaacaagtgagtgaactatttatctacctccccaagacagtgtggtactggcagaacaaaagagagcacctggaaacagacccacacagacagaaccaactgattcttgacaaaggtgaaaagcgattcactggaagaaggatggctttccaacaaacggtgtggacttattggacatccagaggcaaaataaataaacttcagcagaaacctcacaccttattaaaaaaaattcaaaatagatcacaaacctaaatgaaaaacgttaaacgttttagaagcaaacacaggagaaaatctttgtaatctgggattaggcaaagagttcgtagatatgacaccaaaaaagataaagttgctaaattggactttatcaaaatcaaaaacttgctcagtgaaaagttaagagaataaaaaatcaagctacagactgggagataatattttttaaatacctaaaaaaagagttggatctagaatataaaaagaactaccaaagtgcagcagtaagaaaatcagacaacccagtttttaaaaaatggtcaaaacactagaataggtgtgttaccaaatggtatatatatgtgacaagcatatgaaaaagatgtttatcatagtcattaggcagatgcaaatgaaaatgatcatgaagcaccactgtacacctaaaacctgacagtaacaagtgccggtgaggatgcagagaaactggaacatctaaacatttcttataaagttaaacacagacttaccatatgacccagcaatcctactcacaggggtttacccaagagaaatgtgagcctgtgtccactcaaaaatttgtatgcagatacttattagaagttttattcacgacaaggccaggcgcggtggctcacacctgtaatcccagcactttgggaggccaaggcaggcagattacctgaggtcagaagttcgagactagcctggctaacatgatgaaaccctgtctctactaaaaatacaagaattagccagtgagccgcaatgaactgcagtgagccgagatcgtgccacagcactccagcctgggcgacacagcgagaccccgactcaaaaaaataaaaataaaaaagaagaagaagtcataacactataaaactggaaaccacccagatgtccatcatcagtgggttaacaaattgtaatacatccatacaatggataaccagcagcaataaaaaggtacgacctagtgattcctgcaataacatggatgatctgaaaagcattctgctaagtgaaggaaagtcagacacaaaagactacatacagtatgatttccttcatataatattctagaaaaggaaaaaccatagcgacagaagaaagcacagtggattgcgcggggccagggctggggaggaaattgactccaaaagggcacacgggaattttttttttttaggtgctgtaaatatgctacattataattgtgaggtggttacatgagggtgtatatgtgtcaaactcatcaaattgtacatttcattttttactaatttgatcctttgtaaaatatgccacaaaaagctgacttttactaaatcagtgggggccaggcatggtggctcatgcttgtaatcacaacattttgggaggccaaggtgggaggatcacttgagtccgggaagttgagatctgcctgggcaacatagtgaaacctcatctttacaaaaaatcaaaaaagtagccaggtgtgggggtgcatgcctgtaatcccagctacttgggaggctgaggtgggaggactgcttgagcctgggaggttgaggctgcagtgagctatgattgagccactgcacttgagtctgggcaacagagatcctgtctcagaaaccaaccaaccaaccaaccaatgggaagtaaaaatccatacattaagccaagagttttttggaaaaggcacaaagatggaaggattttatatagaagatatcaaaatatggtaactataaagcaaccatattttaaaagtatgctcctggtacagcaatagacaaatggatctcttgacataaaataaagtccaaaaacagagcaatgtacatattcagtaaacactttaggcagcaatttaaatttgcaggaaaaaatggactgttcacaattcaataaatggagttgaaatctggatttcatttggaaaaagaattgttagttccataatgcacatcgttctcaacaataaaaccttaattgattaattgatcattgacttacttgtgaaggctcacgccattgatttcatgatcctatttaatgtctggaagaccacctcctggattatggtaggcaggaccctacaataaattaaaagaatgctcctgaacacccaaactgatggtgtcacttctgccttctagcgggcatcagtcatcgcactgggaagataaatacctgaagtgttcccttccgcctacacagataaagcagagagaatggaaaccctgaaatgtcaacatccctgctcgctcttccaagatgccgaaatagatatgtgatcgtgtgtgaagctgagccctttaatgttacttagatgtccaacagagggacgaagagtcaaaattctctgcattataagaggaattcaggagaagcaccttccaggagggaaggctctagcaacaccagaggaagctgcagctgggaaggaggcagccagggaacagttcttggtggcagggccaaaggacttccaagacaaggaggccaatggctaatactcaaggttaagccatcagtgtcaagcagtgtgagcccaccctctgtccttccaaaccttcagtaaagacctaacacctgactatgctgggtgagttgttctggggtaagtggcagttttgtgggaaagcttttcttcctattcctgatctttccttctatgagtcaggacatccattcacctgacactcagcctccctctgcccctggacacctgtgttaggccattcttgcattgttataaagaaatacctgagactgggtaatttgtaaagaaaagaggtttaattggctcacggttctgcaggctgtacaggaaacgtgatgctggcatctgctcggcttctggagtggcctcaggaagctcagaatcatgttagaaggcaaaggggaagcaggcacaggcccagagcaggagcaagagatggaggggtaggtgctacacccttttaaacaagcagatctcacaaacggactcgctctggtgaggacagtatcgaggggatggtgccaaactattcatgagaaatccgccccatcatcaaatcacctcccgccaggctctacctccaacactagggattacatttcaacaagagatttgggcagagacatgtgtacaaactctaccaccacccctcatttgctggaaagagaagctgggccagcagagctcagctgctgctcctgcttgtctttcagaaccagccaggtgtagacctgggactgcacacgcccttcggtacgccccttcttccctggcctctgagtctctggtttctgttaggaaacccactactgtgcctccgaggcacattctcctctccttttgtcttggtttaggagtctggcaggggggagagggtatgatttatggagcccctcaaatctcaagaagaggttccatgtgtaaaggaaaagccccaagattcatccaagcacccaggaaactgaggacacagtgtccttgtgggaactccctgagaaattttcattccagaactcagagttgagggcatcttccttctctttatcttatccgactcttgtcctaaatccttcactttgtcactggagtcctgacagaccctttccagcgccttctctttcagtcactggccttcagaatctcaagagcagcaatcccagctctgccaagcccccagcagtgtctgccagagcgggagctggggcagacaagctgatgatggagggaaatgaacagaaacggcttttctctgagacttctctccaaaatatgtgctgctttggctctgaagggcggaactttattttattttattgtcagaagaaaaagagacgagttgcttctgaccaaaaaaaattcagtcagtcatagatgatgactggctccaacccaaacgcagattatgggaaacactccattttgagcaagcatgaaggctttcccagcaactctcgtcaacaccaattatttacccttcactttggcgctctgtccttaaccaaggcaagatttagaatcactgaatcatgggatcattgggcccacttgcctctacctacccaccccatttcatccatgagaaactgacccaaacgatgacatctcttacctacttggtaagcagtggcatgatctggaccaggatcccaaactctggagtctcaagtctacactcatcccgtggctcaggatttgtttcacagctccaggcatcatctcccttggggaaaaggagttccttagtggcagagagctagtgctttgcagagagaagaaaagagtaccaaaatttgaagagagcctgccatgttcctgttgcaaggctagtgacatggctagagtggacccctttgggaatgtcttcctaacaagcctgtcagttggaggacattgttttgggctgaattgtgggccacaaaaaattcatatgttaaagtcctaacccctggatctcctgaggtaaccatattcggatgtagggttatgaaagaggtaattaagttaaaatgaggccgttagggtaggccttaatctgaccacagtcctcataaaaagaggagattaggacatagacccatacatggaggaaaaatgtgtgaagacacagggagaaagtggccacccgcaagccaaggagagaggcctcagaagaaaccaactctgcccgcacctcgatcttggacttccaagctacacggctgtgtctaaacaaagcccagttgtttcagcccctcaatctgtggtatcttgttggggcagcccggaagattcatataggcacccagtccccatcctactcaggcttccaggctgggagcctgcccctctggccagagccaactgaaccaaacagactctatgtgaagagctggaactgagagtggcacagagatcgctgcatggaagagctttgttagtggagactttggggtgaagataccccctccttgctgctgagagccccagaacggctctggtcttctctgtcctccctgtggctcccaggctacacttcctggtaaaatccaggagagaccccaacacccttccaagaaattccctttcttggttatgtttgaagtgggttttgttacttgcaacccaaaagactttagccgtgacattgacatgtgtcacctcatacagtgtaatttctccctgagatattactgccccatcttacagaccaaggaactgagattcaaggatattaagcagccagtccaaggtcacaaaatggtagaactatagggatctgcactcaagcttcttcctctctccacactgtcctggatgctacacttcttccttatccccctgagcgctcagctaggagtcagacatatggtaggtgctcaataaaagcttgttaaatggaatagagcccacaggcatatgttccatctttagactaaaacatagataaatacgctgcctgttcacacagtcggagccacaggtaaacaaaaccagtgtcgggaattcattcgtctcgctacccttctctattcagacctaatgaggccagagagcttaacccaggctttcagtggaacccttgcttcactcagtaacaccaagatagtctggtctcattgaattcacaaattccctctaactcttcccatctgttccatgtttatttaacctgcagaccagggcagctacttccccagcggaacttcatagtctccagaaagaaagatctgaacttccttccctcccccttttgtcttgtagcaaaaggacataaaccaccctttgttaggaacagtaaacttgcctttttttcaaggcttagggctttgcaggaagcaagtagctggggagaaaaatgaagaaagggctccactggcaagggctttcagggtatttttctcttctttataaaaatgaaattacttttcccctgttgctttggaaaggccccaaaataaacctaagagcacttgcatagctgtcattaaacttcccaggctgatcgagactctgaggctccctggcagagaaagatggttgatctggccctgccatcttgtatttcaacgtggatgcttcaagctcgggagggggccctggcctcttagtgcagcatcacagagcaatgagagagcaatgcgttattctctgacattttacagactagaggagtgagtgtgggggtgcttttccccaccatgaaaccctccatgcggggccctcagtcgagacatgcagcctgtgcctccttgtcttccaccctctaacaggctgcccgggcggggaaagacagcacaggtgcagtgagcatgccgcgcaggcactcatccacactgtttgtgtttctattatacatagccataattaaccatgaagacttctgggaggagccatggattccagcctcagcaggggaaaaaacacaccaaaattatattccagaattagagccactgacgtttacgtggcaatttacaaagtaatttttatggggctgtgttagtccattttgtgttgctataaaggaatactcgaggctgagtaacacataaagaaaagagacgtggcaccggcatctgcttccggtcagaacctcaggaagcttccacacataggggaaggggaggaagggcgagagggagctcttttaaacaaccagctctccagtgaactaatagagctgaaaactcagtatcatggggagggcaccgagtcattcatgagggatccgcccccatggcctaaacacctcccccagcccccacttccaacatcgggggtcacatagcaacatgagctttgcaggggacaaacatccaaaatatatcagggtgttttcatggaagcctctcaaccactctgtgagggaggaattcttggcactcccatttcacagaggagaaaaccgaggcttaggacacagctgcctcctgagagaaaggagcagccagaaacagaagtgctatctcctaagctgggactcgactttccttcccgtggcactatgcccagcccacgagccagccagcagtgtgggtgtcaccagcccccaacatctgaacctagttcaaccctgattcttgcccctttttttttccaaattggaaatcttgatattagatttttcctaattataaaagacgcacttctaaaagagattttaaataatacagaaattctatactaaccaactctccctgtcccaattaaaaaataaaaccctaaagataatcagttatctttatagatatgtagatgtaatcagcaatttccattttcccttttgagcagctgggatcccagcaaggtcaccctcacactcatgatcagattgccaggactctgagccccaatccacgtgactatgggacctcacatccctctcccatccccaggttgtttctcagttcccaaagggcttgaatactggctgtcccctacagcttatggggcagctgcctccactttcttctccagctctgactccctaggctgtcctgaggaactctcagaccttccagaaggagccttgcttctcataggtggattggacagatgtgtgtaaaatctcatttctgtgtagccatctagacgcccttggccaggccactctggcaaaacccttggacagcacccatccctcctctcacctatttcccagcatgagaaagcccaatagaatcgtgagccctggatgtggcagaggggaaggagggcttttaaacagatttcttgaaggctgtctcttaacaggtgatatggtttggctgtgcccccacccaaacctcacttgaattgtagttcccataatccctacatgtggcggaagggatccagtgggaggcaattgaatcatggggatggttacctccatgctattctcataatagagtgagttctcatgagatctgatggttttataatgggcttccccttttgcttggctctcattcttctccttcctgccaccatgtgaagaaggacctgtttgcttccccttctgccatgattctaagtttcctgaggcctccccagccctgaagaactacgagtcaattaaacctttttcctctataatttacccagtcttgggcagttctttatagcagcatgtgaacagactaatacaacaggtaacacaaaaatctcagtgattctttctctcacctgcatgaaagcagccttgagaaaacagtattttgggaggatttttgtggctcttaaatgtaccaattcaatacccagtctctctctctctctttccttttctctctctccttccctctcccacctcccagctctctatctctgattatctcttcctttctcccacactctccctcttcaggttggctaaccccaaatccttaaatcgctaaccactccttctcttaagaaactatcatgtatccctcccccaccacccaagcaccccatgccagcgtctaggaagctcagataggggtgtgacctttaaccctgtcagcccccaaagagaacttgtgcatatctcttcttgaacttgtcatttaagagaatgaacccaaataaaatatgtccctccctctatgatttgtcaacaatgaaaagatgaatcaccaaacaaaaatacaaacttcatatttgaaggcaaccaaaaagttagatatttactccaaactaatgtcttttgccaggctctaattaccgaaggtgggagactgtctaagagcacagggtaatgtctctcagaaacatttatgcacttgtgtttatggtccataatataattctgtctctcatattgatcagatgctacagtcctctctttggactgtagtagcaactaaaagtccatcttacaagcagcactcctcttcttccagattttcatcagtatagttttagaaaatttccagcctaggcaacatagcaagaccctgtctctacaaaaagaaaatgaaaaattatctgggcatagtggcatgtgcctgtagtcccagctactcagaagggtgaggccaaaggatcacttgagcccacaagtttgacactgcagtgaactaagattacaccactgcactccagtctgggcaacaaagtgagatcctgtctcaaaaaaaggaagaggaggagaagaagaagaagaagaagaagaagaagaagaagaaggaggaggaggaggaggaggaggaggaggaggaggaggaggaagagagaagaggaggaggaaaagaaagagtaaggaaagaaggaaggaaggaaagaatgaatgaaggcaggcaggcaggcagggagggaggggagaggaagagagaagaaagaaggagaagaaaagaagaagaagaaggaagaggaggaggaggaaggggagaggaggaggaaaaagaagaagacatgtatgtattagtacatttacttgatcagcattggataactgcaagggagatatctacagcaaagcaaaaatatattttttaatgtagtatttattcatctctgcttctgaagaatgagtgtactctcatcccctaggctccagcatacccgctgtcagaagtatcccttcctttctccctcacttaactaagttgaccccctaccacactgagttcaagtttgggggcctgaccaggaaagaaatatatgtcagctttacaatgtgcctttcagaaaactcaagtgttgtctttataaatttagatgtatctgtttttttctaacccaagatttcttccttcatgggtgagaatacaaacgattttgtttagggatcccagagaatgactgtgaaatttctgcatcgttggcagacaggtggtgcagagatctcccacttcggggtctgatgctactcactcgtccatttggtgagtgcacagtgagcatctactctatgcccagatccctcctaggcttagagaactaaggaaggagctgcccttgggacctctccagctaggaaaggatggagggatgggatgtgctttaggggagctgtgctcgggacttctccacctgggcgaggacggaagggtgggatgcgctttagggggccactccatagaacaccatgcagatggtgcccccccgcacgacccccagcatcagagttgtgcactgatggcctgcagatgagcaggggagggaaggaaggctctatgccgctttgcgtgtggtcagaggcatttctcccaatgcttctgcatcctattggtgagtgacaggtacacagcgggcatgcgcagtttccagctgaggattgtccctttggagctcatttggcctgcaagctttccattcatgttacctaatcgccctccccccaccccccattaggcctgctcccaagggtggctgaaattcccagaattcattattaacatatttttgttctgactccactttcaacagccatttttatctctgacagcaagctggcctctgtctctggggctggacagcatcatgcccagatcactccattttcagagcaggctttagcagactcctggctgatgggagccccagggaggggagcgggagagtgagcgacctgcccccactgcaatcacacagcaagggttacttccccctccaccaagtgggaccctttgcaaagcctttgctccctctgcctttgggttgtcataattcagaaggcaggctgctatctgattagcccaaaacgctcctagaagcttctccccaaaagcacccattcaagcaccacagcttccaaattactcaacattcaattggttcataaaaatttgtattcctggagaaagtcaaaaaattggaaatagttttagttgatttaatagagttttttttaaacagcattttgaaaaaaaaatcataaatccctatagaagtaaattgctggctgggcggtggctcacgcctgtaattccagcactttgggagaccaaggtgggtggatcacaaggtcaggagttcgagaccagcctgtccaatatggtgaaaccctgtctctactaaaaatacaatagccgagtgtggtggtgtgtgcctgtagtcccagttacttgggaggctgaggcaggagactcacttgaacctgggaggcggaggttgcagtgagccaagatcatgccactgcactccagcctgggcgacagagtgagactccaacccccgaccccagaaaaagtaaattgctttggccaggcgtggtggctcacgcctgtaatcccagcactttgggaggcagaggcaggtggatcacctgaggtcaggagttcaagactagcctggccaaccctgtctctaaaaatacaaaaagaaattagccaggtgtggtggcaggcacctgtaatcccagttacttgggaagctgaggcaggagaatcacttgaacccgggaggtggaggttgcagtgagccaagattgcgtcattgcactccagcctggacaagaagagtgaaactcggtctcaaaaaaaaaaaaagtaaactgctttataactttaaatggtttttcacacctttaccatatctaatcctttcagtaaaccagttcaagatttcattaattatgtctaacttttgtcatgttgttataaataagaaaactaaccagagggaggttaagtaacatgcttagggttctatgctgggccggacctagaatccgtctcctcttttattctcattgtatgttcattccacatcttaatccgggcccagatttaacagcctcagttctcccaccaaattcacacaatccagattcattcattatatggcacaaagatttcactagatgttcaaaactacattgtttgtagtacaaaaaagtctagaaacagcctagtacataacgccgagagtttggttaagtgaactattcaatattgtgaaatattatgcagtcattgaaacaaagttgcaaaagtatatttggtgatatatcaaactattcataatatagtaatatagaatatgcacagcaagctgtcctttttataattatatgtataaataaaatgcataggaaatcatgtggaaggatataccctaagatattaatagtggttacttatggagatacttggattgtagatacttttactgtcttcatttcagttttctgtagaatcttctaatttttctacggtaaaaatacatttcttgggtactttttttttttcttgagacggagtcttgctctattgctcagggtagagtgcggtgatgtaatcttggctcactgcaacctccgccttccgggttcaagtgattctcctgcctcagcgtcctgagtagctcggattacaggtgtgtgccacaatgcccggctaatttttgtatttttttagtagagatgcggtttccccatgttgcccaggctggtcttgaactgctgacctcaagtgatttgcccacctcggcctcccaaagtcctgggattacgggcgtgagccaccgcgcttggcattcttgggtactttttgaagtttcaaagttatttcagcaggaagacccatctagttaaagaataaatgtgtgcttggccaggcgcggtggctcacgcctgtaatcccagcactttgggaggccgaggagggtggatcacgaggtcagtagatcgagaccatcctggctaacacggtgaaaccccatctctactaaaaatacagaaaaaattagccaggcgtggcggtgtgcgcctgtagtgctagctactcgggaggttgaggcaggagaatggagtaaacctgggacgcagagcttgcagagagccaagaacgtgccaccgcactccagcctgggtgacagagcgagactctgtcccaaaaaaaaaaaaaagaacaaacgtgtttacgcctggggtaagtacatttaatagtgtaaaagttcagccatttccatctattttatctcatccctaactggctatggatggtaaactcagttgacttctttgaggataaccataaatgtgtttcacaagcttactgatgtctacttttagcgaatttcttcaggaaacagaagattcattattaaacatttttttgatgtctactatgttgggattgttctccccagaaacctcgtgtattgctgctcaaacctaaagagaattactctactctttactggacaaaatcacaaaaccattgactgggccaccccaaattgtgctccctcagagagtaccactgcctcgaagtctttttaatctatttctgcttgatctatcatcaaatttccctgagctgctgttcaaacctgtccacatttctttcatttctctattccattcccacccgactcagtttcatcggatgacttggcatcctcctctctcacttgagcctcgtggctgtcacactccggtagctaaggccacctttgttcaatggctctctaccgggaggcataaaaagtacggtgacacgtgtgctggttttcccgggacaattgacatctgtcatcccgacttaattattagacattccctgtttcgcgaatgtgccctgatttggacaataatttttatagtcctactaatgatgagaaaaacattgaagatggaagctgttctcagtggggactgtcccttgcccctttttcggcctctgtgtcttggctcatgctaatctttcttgtactcagtgacaaaaatgatctcttgttcctgtgagaattctgactttattacttcttaatctgcatgatcatctagtgcttctcagactgatgatctgtgtatattttcttttaaccacccatctcaaacagttcaattcaaatcctcatttcagagctacagaaaaatgcatgtgaataagactcattcttacagaggaaaaaaaaacaggctagaacgaaagtctgctcattcacagattgttttcccccaccctggctcccttaacagccacatcaggactggattctcccaggttttccttcagagtggagagaaacacagcagttgttgccttggaaactctgtccaggggctggcatcacgggacttggctcgcctgctctatggctgacatccaaagctgactcacttaagtttcgactggttatggcttcgctaagggggacatagcgattgaggagagaggacaggggaacttgagcaagtgaaatgactatagcaagacatctgtcttcttcacagagagtaactcaaatgatggcaaaaggaataaccagtgcactttaataatgaagattcttggtgaaatgttggcagccagagatgctgttaaataaaatgttcacgtgcccatgttttaatccagttcagaattccatgagctgattcaagaatttcttcaagacatgcacctggtgccacctacaactgttcattacacagcagcagcaaatgtgggcggctcttctattctaagcttcttttgtggtcttggttctctaatgggcagaatattgtctatgtccatcagattacaaatgccttagatgagcctctatcagctatcaatcgaggtttccatttcaaatcaatacctaattaaaataacaaaacatttctgattgcttttttagattacttttaaaaggaaacctacggagcatcctaatccaaccccttctttctacagatgaggaaacctagcctgggagatggacgccagggatgtgaaattgctccagttgttggaggctccgtaggacacacaccccaaggctccaggactcccagtgtgctggaacctcacagaactaccactttgcctctgcataatcacttaatgcacgagtatttttttaatctgtttcagcaaatggaagtctggcataaaatgtagttgcctgagttcactttaaagctttggacaatgttgtcgtctaaataatgtgctttggatgtcttgacccataacaagatagcactgttccttaatctttccaaaggaatctatagcattaatacagatagagggttcctgccaagtctcgtgtgagtcagacacattagcaaggtgatcagaaatgtccttattccggaagactgccacctctcagccggcaactccaaactgagctggcaaacacagcattaaggactcagaaagcattgggggaggggatttagtaacaaatctgagtcatgaaaacagaaaacgactgaaagagaaaacataattaacttccagtgtagaatgctagtgccttggggaaaatcctgtgcaagtgtagatgtaagcaattttagggacgaataccgaaaaagctgttagcagtctgatgggggctgcatcggggacggggggccttgactattattttattttaattaagaatgttggttacaggagtgaagggataaagtcaggttgcaatgaggcaaccttcctgttggacagggcctcctgcagctactgagtttcccactgtggttgtgaacaggctggacacgatgaatgtttacatggtgaaatgcggccccttgtggcctgattggggaaacaaaacaaaaagtccgactcacagcctgagagtgatactaacctactttacagcatgtcaaacagtgacactgaaaaaatgactacggtactcagcaaaattagtaatcacaccaaaacgcaccaacatataaaagaaccattttattcaagaaagccgggaagaactgtcccctaagtcagctcgtgtcacacttgaacgtgcctggggaccacctagcatcttgttgcagcagcacaggtttggttcagcgggcctggatgaggcgtgagggtctgcattttatttatttatttatttatttatttatttatttatttatttacttacttacttacttacttagagataggcctgttgcccaggacggagtgcagtggtaagataacagctcactgcagcctcgacctcccaggctcaagcagtcctctcacttcagcctccagggtggctgggactgcaagtgcacgctaccactgctaactttttaattttttcgtagagtcttgctggtcttgctatgtcgcccaggccagtctcgaactcctagactcaagcgatcctcctgcctcggcctcccaaagtgccaggatttcaggtgggagccaccgtgcccagccagggtctgcatttctgataagcctcaggcaatgcccaccctgagagtggccaggggctcgagggaagggttggccaggtctcctctgtcagggcctcctcgctccaagaccgcaggcctctggagggcattctctgcctcgccttggcctcccaggggttacaattctttcccacacccaagcactgagaaggctggggagccacttttctttcgcatcttcaagctcaagggcctccttacctcagctcaaggtcatcatttccccctaagaaagagtatcctgtgaggagacagcccactccctgacaccttcctagcctactctggaccttcctacttcaggaagcaaccattccaggacggcatctgactgtgtcttatggattccgcattcatgaaagccacaggtttctttcttgatcactgaaagcagcaggtggttttcaatgccattgcctccaagtctcctcttgggatgtgcctgtctgaaggtggcgttaatgtgtatctgccgggcttctcccttgcacccagacagcgcgcactgaggcccactccggcatcttgtttccagtgtcagagtggcattcacaccccaccccacccccaatcccaagaattcattgtatttggttatgaagaaaatctttaatacaaagtatttttaacccagtgtgggaggagaaagacagaataaatagaacagtagaatgatcacagatgggtaattacacatgtaaatgagctcaatttggtaaatttcctttgagttcctatttacctgattaacattttatgctagccccacagcaccactgcagtttgggttactttctttttactcttatatgtcaattctgaaatatgaaaagcaattttgaatactttggtggaaccatttttctcagctttttttttttcagatttttccatttaccatcataactggtctacaaagtatgaattgcctccagtgtacaaggtcccacaacatgttggatctctggaaaacacaaccctagtattccaggaacagttcccacaaaactagaatacaaaatctaagtaataaggtcagaccatgctgaagtcatttaagaataatgaagtgggagaaatgacatctgactgagaaatcagcaagggcttcctggaggaagtggcactcaagcaagatcttgaaggacaagtaagaactgtatatatacaaaagggtcaggtgtgagacagagagtacacagggcatatccaggggatgtcggcagatcattagaaactcaggaccagggacccggggagacaattgagggctgtgggaattagagacacaggaatgatcactgaaatcctggcagggcggaagtagccaagagagactgcagagagagaaaggagggcaaaggcagagcccgggagaagcaggaggaaggtgaactccggcaaagcagcagcaaggaggcaggaggccactgggcaagtcggacgccatcaatgcccaaggatgaaagcaaacttgtttgtttttggtttcataaaaattttcaaacaatacacaggccaggtgcagtggctcatgcctataatcccagcactttgggaggccaaggcaggaggatcacctgaggtcataagttcgagaccagcctggccaacatgggaaaccccatccctactaaaaacacaaaaattagccgggcgtggtggcatatgcttgtactcccagctacttggaaggctgaggcaggagaatcacttgaacccagaggcgaaggttgcagtgagccgagatggcaccactgcactccagcctgggcgacagagtgagacgacctaaaataaaccatacacactcaaaagtgcagatataatgaacccccacccgtgcccattcataaataatcagcagagattaagatgagggccatactatcccttttgctgtgtggttactttaccgacattttaccacaaaccccaggccccatggcatccagcccctgcatacatcattatgcctcgctcagaaatgcgggcaatcaagaagaaaatgttaaaggggagaacaattttaaattgttggaaattttagggatttcagacagacagtaacactttgtaggaactcactggcggccttcaagagagtagtttcagcaagatgcctggaggaccaaaagcccagagttgaagtgttgagtgggcaaagtcagtgcggttaaaaataagagagcagttcagcgaggtgcctgggccacgggagggctctttgtcaccaagatgagacgtaagtatgcttgcgggtcaagataaagaatcaatagagtggttagagaatgaagatgtgagtaaacagatgctcgatgcagcaacattcatttgttccattgaagatggaatgagcacgtattacggggctgcattctttttggcccaggccatgagatggataaaatccctgccctcgtggagctaacactccaatggcaggacagacattaaaccaacaaacaaatgtaaaatataatgcccaacaatgataaccgcaataaagtaaaataaatgactcaaaggaggtggcacacgacacagccaagaagacacacggagaggtgagagcttgaaagagaggccagacagtacctctgggcagaagaggggctgggggatctggtagccagagaatctcaagggagggacaactgcagggaaaggaactcatgctgagttcactgtgttctacagaagaaaaagagagaagctcaggatttctaaacccttctagacgctaagattgctaatactatattaactgacgcaatgtccctttatgtgttttactgctaaaaaacaagctcagagtgagggaagaaggcagccatgcacagaaggaaggcactaggtctgcttattagccaagtgggacttcaggcaatttaaagtctctgagcctcagtttctgcatgtgtaaaatgggtatgatgcttcctacggaagagggttctgtgagaatgaggtagtaacatacatggagccccaagcacagtgctccgcacctcctaaatgatcgttaagtgctatcttagaaaagaaaagccatccctagggaagcagttgtgacagtcaaaaagcagctgtcctgttttgagaaaaacccttggaaggcttcctaaggtttctcctcaaaatggctacatgctcttctttttggtttggaaaatgttatgcaatcaaacacacgttttactttctcaaaatttctactgttctcaagaagcccccaaaatgacaagccccgcagctcctggtaagggtggacaacggttaatggagagaaacgtgaaagtgacgacatcctggagagacctcaattatcccatttcctcagatccacacagttggttcatggtctcacttcccccctttcaacatttctcatttcctttcagggttacgtgaattagaaggttgaagagcccttgaagggtcaccttgtccatctctgccttaaaattagataagagaagaactaaaaaccatggtggtaattgttcagggaaaaaaagagttatagagttcatttaattttgttaagctaattagtagaggtccacagagccaacttgaatgaaatgaggccagttctatttgaaatcacatttaggccaataaaactctaggccccagcacatccattcctcatcccaaactcccctcccttctctaccttcgagcttatcactgggatttaaacaggtgtgactatcccaaagaaactacaactctatagactggccatgactgcactcgtgccctcgtgattagctgcctaaatagtgaattagcctacagatagaactcagctctcactaaaaaaattaatgatcaatacccaaaatatgtcagattagatcaaaaaataagttattctcccttagttcaaaagtcattgctaacaaattgtctctgggtgttcactggcaagcaactgcccagttatttatcctatctggggagagcaaaatagatgtacataacatcaactacttatataaaattttaagtcatttgtttcaggtattttgggttttctccaggagaggtggagaatgtggctgtaatccctaaagtcttagaatgagactggacacagtggctcacgcctgtaatcccagcactttggcaggctgaggcgggcgggtcacttgaggccaggagtttgagaccagcctggccaacatggtgaaaccctgtctctactattataaaaatacaagaattagccaggcgtggtggcacgcgcctgtagtcccagctacttgggaggctgaggcccaagaaccgcttgaacccaggaggcagaggttgcagtgagcccagatcgtgccactgcactccagcctaggtaacagagtgagactttgtcccaaaataaataaaatcgtatttccagacatggctaactttaaaaaaaaatgagtttcattttagacgtactaaacgaaaagatgttaggacttgttcttttgggtgttgaaaagagaagtcactttctcttttcaactttaagtcaaacagtataaaaggaatacacagcaatatgctgcaaacccagctggggtcggggaagccttcttttttttttttttttttaagcactttctgatttctcaggtgtaaatatccccattatggccaatttcaagctaccaacagtttaatgaccagctgacaaaattcctgaaaatttcataattggctctcccctgcacaccactggagctagacaaagaggtgagtggtctaagatttctttcatgccctgtcttttatttggttagtaaactcagttgttaaataaaccactaaaaagtgtgaatttcatactgtataatcacatttaaacaagcttttaaatatggttctcatcctaggtgatcattaaaactcaggttataaaataatattcgattatatagaaatatttttaggaaatattttaagtgaaaatagtgtgaccagtatgaccccaaatttgcatataaaaatgactagaaggatatacctcaaaatgtgagtaattattaattgtaagattatgtgctttattttcttctttgtgcttttttctatttttcagattttgtgcaatgtttacaactgggaaaaaaataaagccaataaatgttatatagtttagaaaaaatatatagcatttcagattatgtatagactggctacaagactgaatcagattgactctatttaaataaggctaaatctttatcctttatttttatgatgttttactgctttcaaagtagtgtcatatgcattatctaatttgatcatccttgacgcagggaagacaggttattatactttcattatacagatgcaaaaacagatgattacatgatttgcccctgatcacatggctaataaagcagttaaactgggactttgaccctggatttctggttgctacccccaagaccctccttcaaaaacaagctgggggaagctttgctcatggctccttggtttaagaagttcctactgaaaacctagatctgattctgcaacgggtccctctcctggtcttgagcattttaaatgtcccatgcttgactagaatcatccgggtaggacacatgccattcaggcatcgatgctacacagaatggtgcctccagtggactctttagcttggaaatgtatgagcatgactggagaacttgccaaggacagcacccacactctgggatgaaaaacaggcacaatgttctacaaacatccagttacaacaatctttaaaggccgcataccaggttctggaatcagtttccctatcttctccctaaagaactagggagtgccctttatgagaatggccgaaggagtaacttctggggagatctgtctgaagcctctgctgggtcccgtgtggtttggcctgggacatccgcctcctgctgagaggtgacagcgtgctggcagtcctcagagccctcgcttgctctcggcacctcccctgcctgggctcccactttggtggcatctgaggagcccttcagccccccactgcactgtgggagcccctttctgggctggccaaggctggagcccactcccgcagcttgcagggaggtgtggagggagaggcacgagcgggaactggggctgcgtgtggcgcttgcgggccagctggagttccgggtgggcgtgggcttagtgggccccgcacttggagcagccagccagccctgctggccccgggcaatgggggacttagcacctgggccagtggctgcggagggtgtactgagtcccccagcagtgccggcccaccggcgctgtgctggatttctcgccaggccttagctgccttcccgcggggcagggctcaggacctgcagcccgccatgcctgagcctcccacccactccatgggctcctgtgtggcccgagcctccccgacgagcaccaccccctgctccatggcgcccagtcccatcgaccacccaagggctgaggaatgcgagcacagggcacaggacgggcaggcagctccacctgcagccccggtgcgggatccactaggtgaagccagctgggctcctgagtctggtggggacgtggagagtctttatatctagctcaaggattgtaaatacaccaatcagcaccctgtgtttagctcaaggtttgtgagtgcaccaatcggcactctgtatctagctgctctggtgaggacatggagagtctttatatctagctcagggattgtaaatacaccaatcagcaccctgtgtttagctcaaggtttgtgagtgcaccaatcaacactctgtatctagctgctctggcaaggacgtggagaacctttatgtctagctcaaggattgtaaatacaccaatcggcactctgtatctagctcaaggtttgtaaatacaccaatcagcaccctgtgtttagctcaaggtttgtgaatgcaccaatcaacactctatctagctgctctggtggggccttggagaacctgtgtgtggaaactctgtatctaactaatctgatggggacgtggagaacctttgtatctagctcagggattgtaaacgcaccaatcagcgccctgacaaaacaggccactcggctctaccaatcagcaggatgtgggtggggccagataagagaataaaagcaggctgcccgagccagcattggcaacctgctcgggtccccttccacactgtggaagctttgttttttcgctctttgcaataaatcttgctactgctcactctttgggtccacgctgcttttatgagctgtaacactcaccgcaaagatctgcagcttcactcctgagcccagtgagaccactagcccaccgggaggaacgaacaactccagacgcgctgccttaagagctgtaacactcaccgcgaaggtctgcagcttcactcctgagccaccaagaccacgaacccaccagaaggaagaaactccgaacacatctgaacatcagaagggacagactccagacgcgccaccttaagagctgtaacactcactgcgagagtccgcggcttcattcttgaagtcagtgagaccaagaacccaccaattccggacacactgcttctggacccttactcctgctcacaggcagtgcttccccagggctcatttaccagaaacgaccacacactgggttttccaattataagaaacaaaaacttgttgcctcaagtagtaggttttagcaggtggatatatgggacaagttaaacacacacacacacacacacacacacgttctgatgagacctcacagaaagccagaaaagccatgccaccaggcttcagagaaacaagcggcccaggacagggtggcccacaacaggggaagtcccctctcctgccagtgtcaccatgcagcacagacaggatgcagcactcccacctggaccccagccttggaagtccctctcactgtgatggcaaggccaccccttcagggatgccacaggttgaggccaaagatgaagactgtcttatgaaacacagtatttcctggattgacgttcagatgcttcagtggagaccatgtaatacaaatgtgtgctggcttctgtctgcagcccaagggagcctcgttaacttcatgtgaagaaccctaacaggaatacacgtgcagagatggaaaggtaatcaaaggcccactctagaggcagccactaaggcatgagctacatttatcttctgatctgtaacagaatcttaattagtaccaagatattagaaattacttttcattggtgaaatgagttttcaagatgagtgaactggctacaaatattgtacagccccttccttccctagtatgaacagggtataaggaatcggggagccaaattgcctatggctttggaatggaatctgaaaatgcttgctggagtactctgtaacctgcacaaccagagagtcagctgagtcttgtggctaaaatactctctcatctgtttagaatgcattttcacacaaggtgccaccaaagcacctaagaggacagacacctgggactacatcgagcttactgcagctggatgctgccttgttgccagcgggtgttgacgtttgcttccacagcaccatagtctgttagtgggagagtagcctgcgagagagaacgcctaaaggactcactcaacgttaactgaggctgtcgacaatctctcagaaagaacagaagaatcctgcatgatccagtcaatgtgacttaggaccttttgctctgagaactttagtattctcacaagtaatcagggaacttcggagcaaacgctgagttactcataccactgagtactgttccgtgacctcactcacacccagaaacaaaggggtctggggaaatttggggttacctttatattcctgagcaggccttccacactgccatgctcagtaatgtgtggatttcacagcaccaggatttctgatctcagttaaatacaattcagtttgtaaaaatcaatcttaaagcactttgttttaatctttattctcttcaattagaaaaatacatactacaaaagtttcacattatagaaaacagaaaaaaacaaaaattcccccagaatcccaccctcagagatggttactcctctttggtaagtattcctccaggttttttaagcatatagtagtacataagcaggaaaaagtaaaatcctactatatataagcaactgctcttgagcaagttttcaaatggttctgacagatcattctgaccaatttctccagggaactttatggattagttttcagagaagattccatgacactgtgggtagacaaacctctaagatttttcttatcatttataataaatgttgtcccaagtgttaaatgtcaaagtttttaaaaatagtaaataaatgtgatacagaggaaaaaaagttcagaaaattatcccagtttcttatcaaaatcaaaactcctaagtcccaattccaacaagtaccataaaacgtctttaaaatgcgattttgagaaacaatcacttctttatcataaaatatagctatagaagtaattctacaattttgggttttttttttgagagaaggtctcactctgttgcccagactagaacacagtagtggcatgaccaaggctcactgcagcctcaacctcccaagctcatctgatcctcccacctcagcgtttcgcatgcctggctaattttttttttctttttttttttgtagagacgacgtctcactatgttgcttcatttaacaaataaggggaggaagggcgggggcagaatggaggacacagactagagttcagcttttacaagtggcaaaggacaatttggattcggcctcccacagcttcatttgtaatgctttcaagacatcttccatctattgaatttaaaaaataaaaaaataaagaaacacacatataattaaaaattatacatggttaaatataattaagatatacacttaatgcaattttggatatgtcatacattacaaggtagatattcagtgtttaacaaaactatttagaggcataaattttttaaaaataaagcataattctatcaacagtagttctcaacctataatctacatctcttttatacaatcatcaccatctcacctatctggcaatgagaaaatgttaacatccaacaacaaggctatttataccacaagaattgaatcaaacaaaatactgatttgaatcaaagatgtatttctagctttgcagtgttttaatatatagttttgattttgacatgacatgtcttcctcattattttgttgattaagctttagcttttgagttccccaaaaatcaactttactaacaactgaaatgaaataagcacactcttcctgcaatcaacacagatgacgttatgagaattatcgtttgtgggggagcacttcttcactgacaaactgttcatacaaagatataaaatgtacagaataaaattacctgtgttagagacttttctatttcaactctgctttcaagattaaaaagctctttatcttctgacacaatttgcttttcagaggaccctaaaacataactgaagtacggtacaaggttaaaatacaagctgggtgtggtggcatgcacttgttcccagctattcaggaggctgagacagaaggatcatctgaggctaggagtttgaaaccagcctgggcaacacaagaccccgggcaatatgcctgtagtcttagctacttgggaggctgaggcaggaggatcgctggagcccaggagttcaaggatgcagaaagctatgaccacagcactgcactccagcctgggcgacagagtgagaccccatatcttaaaaaaataagttttaaaataaataaaaataaaaagctgggggcagggggcaatatcctactgaactactttcaatttttaaaaacaactgaatatacttttattccaaaaattttctcacagtgttttctcctacaatttagagtgtctgacttttccaataccaaataaagaaggaggtcaaagcaaaaaaaaaaaaaattactggcttgttagaaatcattacttgaaaatatatttaaccaaacagtattgatttagttctgacaattccgtgccttaactttctgaaacaccagttgtgaggtaaacatttatatatcaaacttacctttcaatggcttcaacactgaggcaaaacaagtctctcttgtaatcaagattcttgggcgtgcatctgtacacgtagccaagattgagtgagcaccccgcgcagcacaaagtctcaaggacgctgcaataaagaaatgtcttgctttaggaaacgaagcagcaactcattataataaaaatctcactgttaaaatccataaacacctcagtttctcaagtatgctattctgaccacactaggtcatacataaaggataggaaaaaatgatagtaagatatttacaataaaaatgtaaagacagccacgatgccttaagtatcaaatgacaagggacatacaaaaaagtgacaagagagaatattgaggtggtgtttttctagaatataaattcctccatctggtactaatgtaacaaagtggagaataaatattttagcctcgccagccatctggtgtctgtcactactcacctctgccattgtaaaacggaagcacctatagacaatactaactgaataacctgtgttccaataaactcgtattcacaaatgggtgcccgccccatgggccatagtttaccaaactctgctctagtggaaggtaatactgcttggcttaataaaaaaaaagtctctaaagttagatgacaacccatgtaattgtttcttcattctagttacctctcaactcaggttccacacacttgaatataccctcccccaaagcctattcatgtctccttaaaacctggcttagaatccagtgtctcccaaacgccttgttgaactgacccatccaaatttaccattctataaatatactaaaattaccattccaacacatagcaaaatgataactagagatttaaatctagtagtgatcacagtagtaaaacatacaccacaaacgatttttattacaaaagtattctaactcctactcagtatgtgaaacacttgtaatcactaaatatccattcctgctatcaagcaaaagggagctacccaagactcacagattatagactacatcattgtttacttacagatactgagacactgttaattattacagcaacatatggaacaaagaacaaaatggatcaccatctgattaagtcatgaattctcactgatgatgtgattagctggatagtatgccactgattacatattaagtgtctacgggcttttataagcttctatattttagttttatagtagaaatagtctcgctatgttgcccaggctggtctcgaactcctagcctcaagcaatcctccaccttggcctcccaaatgtgagattactggcaggagtcaccatacccagccagcttgtttaaatgtttatatgagaaataaaaagcatgtcggtaaatcccacttaaattactcacagtgaacaggtaaacctccatgctatatatcaaacctcattaccattataagaccgcctcacaccattaccaagactgcaaactaatatctaatgtcatcagccaagaaaggacactcagagaaaccagaggcttgaactccccaaatccactgagccatgaataagactgttttatcccgagttatcaaaatcaacctaaacaccaccaaaaataggaacaaacccattcacacttctagaatcatcttgtggagcaatgaagagatggtagctagtattaaggcagcaactttccgctttcacagttggcaagaatttggccagcattcacccctttcattgaacagtaacattgagaaggcagtgccaataatcgtaaggtgatgttagacaaggaataatccgattgttaagatcctcaacaaaggacaaagtcagacttaacagagaaaacagcactggcaccttcacaacatatttctaaagcccacagtgctcttgctgaccatcagcagaaaggctcaggcaggtatcaaaaaattcacaagcatcccaaagcaacacgggagtgtgcagcacacaaccctagtgaagtccaagacaactgaaggcagtctaatcgatgggtttaggtgatacaaacagtattaataactctggatcaaagagagtgaattctctatcaatcctgattagaaaaaagaagaaagtctcggtttggtgctagactgtctttgacacttgtctcatagtcgcaaatcttttaatagtaacagaacagacctcaggcagagaaccagccaggcaacaacatctcagctagaactaataacatttgttttcactgtaattatcttcagagttactttctagttatggcaagtatgtatttatgatagtaaaaacaatccttttaagacaaatttaaataaaaattttgagttgatttaattttaaaaatttagtatgtaatagcacagttggtacctggtacacaaataggacaaaaatgatggtgatatcaaaatggctagagctagagctagaaagtggagaagaaagagcacttcgaaggcagtaaggaagggtaacaagcatcatcctagctcttactgctaattagtcctgtgaccttagcaaagttctagcctccctgggcctaactttcttcaactaccaaatgagaaatgatctgaggtgggttttccaaatttttatggcctgcatgccggcaccacaatttctgtcacatccacaaaccatctgtactattactaatttatcttaaatggagaaactttttttctttttttttttttttcacttttatggaagagatacatagggcaaaggttacagaagggggacacagagcttccaagacctttctaggtacaccaccctcccggcatctcatattcaccaatctggaagttctctaaaacccatgggttttttggaggttttataacacaggcatgattaattacaccattgctgataatctctagcccctctgccctcgatggaggtaggagaagaggttggggtagggccaaaacttccaaccctctaatcatgccttggtccttctggcccccaatcctgaagctacatagaagccccccagccacagtcacctcattaggattaaaaacgacattattatcactccagagattccaagcatcttagaagctcttctgtcagaactggggactaagaccaaacatggtaacaaaagatacccttatcaccccatcactcaagaaatcgaaagggttttaggagcgactaagtattgaatgtttctgtcccctaccacatgtataagttgaaatggtagctcctaatgtgatggtattgggaggaggggtcatcaggaggtatttggtcataagtgcacagagtaattttttttaaattgaaatatactttatttgataggatactctagcatcactaaaaatgaaaagccagtatttttaatacacattaaaatatacacataattaatttttgtttaactgtgtaccacctaaagttatttcatacgcaagtgtaagatacagtttacatttgcagcaacaattatatagggcagcgcttcccactcagtttgctcaggcgtcactatggcacatgggtggcaggtatggcaagatatttgtcccctctacccttaaagtggccacacagggcttcagattgctggagctcctgtgttgtttgctcttgccacaaacagccttgtctgtttaccccaataggctgtgtgtgtgacagcagcattttatgtgtgtgccataacatgagaaagttgggcagcattagcctaaggcaccctttaacattgagattttataatataggtatttccttttcttctttttttttttttttttttttttttttgagacggagtctttctctgttgcccaggctgcagtgcactggcgatcttggctcactgcaacctccacctccgtagttctagtgattctcctgtctcagcctcttgagtaggtgggattacaggcccgcaccaccatgcccggctaatttgtgtatttttagtggagacggggttttgccatgttggccaggctggtctcgaattcctgaccccccggtgatctgcccaccttggcctccgaaagtgctgggattacaggcgtgagccaccgtgcccgaccttctttttctatttttatttttgattttcttcagcaccaagcccaaagatccaaaaagggaatgtcagcatatgcttttagaaatctagaaactctaacttttcaatatctaaaggtgaccacaaccactcaagaactaacatattcctttctaaaacaggatatagaaaaagcaaaaaaaagaactgatatatgcgaacgactgatttttttactatcatgaaaagttttatcccaagtaatcttactactagtaatgaccttttaaagatttttattaaagaaaattctctaacatattcatataaatacagttttactcaccaaccattttccttttcacgtttggatagcttctgttccttatccacagaaacattacaggaaacacctagaaacagagaaagtaacaataatttattaatgtagttcgttataacatacctgcagacagagagtttctaatccaactttttagaactcggaggacaaaaaataagcccaaagtcaaacacacaaaagagcggtttaaaactaaatgtactggggtcttctgggaaaagatagcagaataagagttatttccaaccaggcgcagggactcacacctgtcatcccaaccctttgggaggccaaggtgagagaatggcttggggccaggagttcgaggtcagcctggacaacataacgagactccatctctaaaaaaaaatttttaaataaaaatttaagaaaaattttaaaaggttatttcctccctttccctgaaaaccactaacattaatagaatggctaaaattagaggggaaaattcattccacagtaaacttggaacaagtagaacctcaaatcacacactgcaaagaattatctgccagatagtgaaattgggttccaaacctaggaagatgcaaacagccaacacatatatctccagatttcaaacacagggcccatttctctaaaagtaactgagagggtcctcaggatcccagccacacatcttttacttgaacaatgacttggacagaggtcactgctggacttcagaggcagcagcaaacattcccaaagaatccagctctaggaaacactaaaggacagggtagagggtgaagagaaatgaagaagggacatctgacctaaaatggccaaaacagactcttgatttcacggcctcctacagtctaccttaactcggtaaactccaactccatctacctgcttgctgaaatcagaaaccagggtgtcatccttgattctttgtctcctcatcctgctcccctgtatctactccactgatccatcccatcaattctacctcacaaacttcactccagcccccaaaccaccagcaccacctcttgcctggactactgccctggctcttcactaacctccccacttccatacttgttcctccttcaatgctttctccaaagaaaatgcggggtcacattactcccctgcctaagctagcataataacgtactcactagaacagattactactctttagaacagactacaacgccttgcagtttctgatctcttccttcctccctaaatcttatctttattctctttaaccagtctcaaggcttttgcaccagctgctcagcacctgtcaaaagcaaagagcgtgaccaagaactgtacctgcagccaagctagcattcacttataaatacaggaaaataatcccagcactttgggaggccgaggcaggcggatcatgaggtcaggagatcgagaccatcctggctaacatggtgaaaccccgtctctactaaagatacaaaaaaattagcggggtgtggtggcgggagcctgcagtcccagctactcaggaggctgaggcaggagaatagcgtgaacccgggaggtggagcttgcagtgagctgagactgcaccactgcactccagcctgggcaacacagtgagactctgtctcaaaaaaaaaaaaaaaaaaaaaaaaaaggaaaatattttctagcacataaacttgaaattttcttggagatgtggacgtggggagcactaatgattaatcaaacaattcaggaatgaaaaagctattaagaagcttttttatgttaatgagtactggagttgggaaaacaatttatataaactttataggattgggtgctgtaactcacatctgtactcccagcactttaggaggccgaagcaggggattgcttggggccaggagtttgagatcagcctgagcaacatagcaagactctgtctctacaaaaaatttaaagattagccaggtgttagtgtgtatctgtagtcccaagctacttgggaagctgagccgggaggatagtttgagcaggcgttcaaggttacatacagtgagctatgattgcgccactgtactccaacctgggcaacagagggctgttaacccactataaccctattaaaaaaaaacctattaaataaataatcctattttaaaaaatcatagttaggctgttatagctacagaacagaatgtaaatgtacagaatgtaaatgtataaaccttgacaaaatgaaaataattaaactaattcaaattgggtaaggaaggaatggaaatgaatccgagttcatttatttgtctttactggggggtgtggggaggtgttaaatcctattatctaaatctgataaatcaaaaaatgtatagttctttaaattttaaactactattttagaactatgttttaaatttaaaagctattgttataaaaattaaataacaaaaacagtctttctataagtaacgcaaaacaacgaaaagagcccacatggcaaaaaatacactctatcgaaacaaacaaataaaatgaaagatgtaacatcaaacacgttattccttaaaaacatgtaaacaagggaatctcattcaaacaaagagcttttcctacctaaccaaaaatctgcttttttcttttttttcttttttgagacgttgtctcgctctgtctccaggctggagtgcagtggcgcaatctcggcccactgcaacctccgcctcccgggttcaagtgattctcctgcctcagcctccggagtggctaggattacaggcgcacaccaccatgcccggctaattttttattttggcgaggctgatctggaatttttgtatttttagtagagatggggtttcattcaccatgttggcaaggatggtctcaatctccggatctcgtgatccgcccacttcggcctcccaaagtgctgggattacaggcctgaggcaccgcgctcggcctggtttgattttgataggtgcaaagagttaatctcaactttcagttaactactggacactggtgtgctcctttattcccagtattacaccaaggaaaacgttccagaaacgtcgataagccggtggtgaattactgccatcggaacatttacggcattcaaagacagaaaaaacttcatcttgaaaaatcacaatccaaaaacaacagccattcttacaccaattcataaaaaatatgtgaaccactttatccctaaatactgcaaaaacatcaaaatgagggaacagtggaacaacagaggtaagaggtaactgctagaaccaggattagaaactaattcctgccttcttctgaactcttttgctacatcctccttcctcgccagttttcatggggttgttggtgcttttattgcaagtttccttccctttcttccctatagcactgtgttccgtcaactctgcggctctatcactggaggctgtagaggcatccgctgatacaccaacagcctgctaatttctatggggagtaatagtactggctgcacctcaagtgcttacagtctagttgaccatttgtttctctttttttagggtctttaaaagtgttattctttgtcgccctttgtttctgagtaatgctcacgatgatgctgattcaaccactgctcttctgggatcggggaccccagaaaagaacccaccgcccgagagccaaagtggaggggtgaccctcctccccttttcctgccacagctcacactctcagactttttgctcttaaagtccctgggcagccccaaggagcccccgcctcctcccgggccgcccacgcgcggcacccctggaagaaggcgaccccacgccccccctgcccggctcgacccaactgacagcgaagcaggatgcagttggtgtcctcctggctggccacccagctcagcgagtcgcccagcggccgccggcagccggagcacaggaacaccagcggcctctcctccgcagccgccgcctcctcctccagctgcgccctctccatgtcggccaccgacgcgtcttcgctcatggagctccacatgctcgcccacttctgcaacagctggtggcggctcgagtcttcggagagtctcttgcccaacagcgaggagtcgctgcatttgcccttgtcgccgcactcacagccgccagcgcatcctctgctacacctcagtgaccgaacgcctgccattacctacaaatcgcccgcgccccagagcgccatgggaaaaaaaaccgccgctgctcatgcgcggggcggggagcggtggcggaggccgagaaggggcaaaagcctgaagggggcgggacggcgggcggcctctagtgcgcatgcgcgccgtgcggccttggccaagcgtgatagtcactgcgcctgcgtcaggttttccagcctgaagaaattgatgatgcagacctgtttgcttgtcttcctaaggattattcacccctttccgtgggaggggcagcgtcactgagaaagttacgggttgcaagcttgagtgtctaagaaccgcctggcgagcttcttaagcagatcgccaggttccatcttcgcagactctggttcagcaggtagcaggttagcccgagaatctgcatttctaacaagctcctaggcgtgcccacgctgtcagtattggcagcccaaccttttttggggggtgggggggggagtttttctatgttgccggtctcgaactcctagccttaagcgatcttccctactcggcctcccaaaatgccaggatcgcaagcgtaagccactgtgccagaccaccaccctttttcttcttttttgtaagtggactaattatagttgtatataagcagctccacttttgatgaccactgctctattttgtcggctcctggggacctcctttccatgaagtggagaaggaaggggatagaggagtccctcatcacagggtccttttgcgcactgctatccctggaatgagaccctgggaagggccccggatcactcaggctgtcactgcaaggaaaaagttgaggaagcagcagtgcccctggaaagcctggaagtgtccctgctgcttggatcaaggaacaattcgtccttgcaaggaagaagcatcccttgttgatgataaggacagatttcctcagctgccccagaaagccagcctctgcctaaaacaccgtaggtcaggagggaaagctggcggggaaccagccagctgcaccacagacagtctggtggtatacctgggaagaaagctacctgcaaggacctactctgttcctactacgctctgggtgtcccccaagtcactgcctattttgcttggttgcataaactatttatgtaaatgtacttccaattttagtgcttacagccactagcaaaaagcaaaagctttggagtcagtggtcctggttaacttacccctccctccacaaggtagtaacagtgtagggaactgtggaaaaggctgtttgccttccctgagtctaattcttcatggagtaaatggagtctgtttcttcagtactacaccaagttgttcatgaggatcgagttttctaatattcatgaaaatactttgtaaaccctggcacaccatgctcatgttaatcaccttcttactggaagaaaatgctttagataatttaggctttttttttttacccatagaattcccttccttccttctgcttttttttttcttttctttattttttcagagatgatgtttcagtatgttgcccaggctggtctcgaactcctggcctcaagcgatcctcctgcctcagcctcccaagtagctggaactacaggcatgcctcaccatactttgccccttctacttttgtagagccaagcctgaccttcctggactgttgttttcaagcataatatctctggtacaacattgatacaatccacatgagttctttaagtaagtggctagttacttggggattcaaaggatcatcttgtctcagactttgggttcctattgtcaatacttaaattctatgataggatgccccaggaaagaaggaatacaaggccgagctgcgtggtgactttcaggggccctatttttgccttagtaggcctttctctccataaaacagttaataaaaatttcattttatagtcacattgctatgaagatgattatattaaaatgatatcataaaacatttttagacctgtaagttcatttattgctcttgattaaaaaaattgaaacattttcatggtccttcagaatatcatggtttgtaggcatgatgcctcctgcacatcatggagaagttggctgatgcaaaatgaattcctctataggcacaagtgtgtttgtattaatattatgaatataaaaacaaggctagccatggtggctcatgcctgtaaccccggcactttgggaggctgaagcgagagagtcacttgagcccaggagtttgagaacaacctgggcaacatagagagaccctgtctctacaaagatttcaaaattagccaggcatggtggtgcgcccctgtagtcccagttgcttgtgaggctgaggcaggaggatgggttgggcttgggaggtcgaggctgcagtaagctgtgattatgctattgcactccagcctgggtgacagaatgagatcctgtctcaaaaaaataaaaaacaaaacaaaacctcagctaaccacaaaatcatcatatttatgggaggacaaaatgagatgcttgaaaaagatgacctcgtagtttgtggttgtggttgcttcctaaactacattctcaccgtacttcctagttatctaactaggagatttggataaggttgagtccatctccaccactctcaccaccagttccgggaatgagtccctagaggtttaacccgatcaatcaggatgaccatgactcttccatagcgattggggcagggatggcacctacccctggcgacccgtgctgctcccctggcaatagggattggctcagaataaaaacttggccttgtcaagttcaattttgcccaatctgagtaagggaatcacagagaaacagcacccaatctctagatccttccagttgtgtgagccaaccagttccagttattgtggaagccagtttcaattgttgttttgtttttactagcaaccaaaaatgtatgtagcaatctgttacagtatgttaaaattgaagtttccactaagactccaagatgaagtaaaaatgagatatcaaagtgtgtgtgagagagattgccctccttcctgggggaatcttcagagtagatttaggagagatgatttcctcctgcttattattattttttttttttttggagtctcactctgtcactcaggctggagtgcagtgacatgatctcagctcactgcaacctccacctcccaggttcaagggattctcccacctcagcctcccgagtagctgggattacaggcacgtgccaccacacccagctaatctttgtatttttagtagagacggggctttaccatgttgaccaggctggtcttgaactcctgacctcaggtaatccacccacctcgacctcccaaagtgctgggattacaggcatgggccaccatgctagctgatttcctccttctcttaaacacctctctcacacactttgggaatataaaggaagggagaaaatcgtgaccaagatgacttcactggaaggatctctttggagatgggcccctccccaatagagaaaatgagggtatctgcctccttgcctcaatttggctgataagagactttgaggagacacttacatacctgttggttcccaggcacttggggacagggtgacctgcaggagcgtcaagctgcgtgtgttttggtagcacaacaaaggcaaacaaggtaggttgtcagccagatcggaactttgctggcaggatgtcacctagagtcttaatttctgcctaaggagctaacctggaagcacgaagactccccagtggtgagtcaagtgtgaacagcactcctggagaaccagggcagagggaaagccagcctgagatgaggccttgcccagtgggtcatgggcatgcactgggatttgggatgtgcagggagtccccgaggggactaggagagagggtcaggtctaactagatcttacctaagagtgcaaaacaaagttagaacaagttcaagtgtgtattagtccgttctcatgctgctataaagaactacttgagactgggtaacttataaaggaaagaggtttaactgactcacagttctgcatggcttggggaggcctcaggaaacttgcaatcatggcggaagacaaaggggaagcaaagcacgtcttacgtggcagcaggagagagagagagcaagccaaggggaggtgccacactttaaaaccaccagatctcgtgagaactcactatcatgagaacagcctgggggaactgcccccatgatccaattactcccaccacgcccctccctcaacacatggagattgcaattcaagatgagatttgggtgggaacacagagccaaaccatatcaaagtgaaaactgtcctatcccccactttccccatctcaggctaggcagaaatgaaaaccgcagggaacaggtgaggtgggaaagagcagggccagccacagccccttccccacctgaggcagggaaggctaaggcggcctatgtcctacctggggcaaagggaaaacagttctcatcctgtagtgaagattgccatgttgattagtatcttggactgacgctaccatttcttcactgggattctgtttgcaatgaaagtgcctacagaattgtctattccctaagaggaccttagaagaacacagagagcatgcactaaaattctgctcgtgtggggagggattctttgcaaaggtttgtaggagagaaccatgagggatggtacaggaatccaggttaaaagcaatgaggccaacaccacccctccctcgacctagagggatgctgggcgaggttaccagaaagaaggagagttgcgaagagcagaccaccttgagacaatcaccttccatccagggtcacagtcaccagctggggtgacctcatagggagggaggcaggagattaaattctctgacctcgctctcttctgtccctccagtttcctgctggaactcgccattgcccatatccagccagaatccacagggcacgtagcatattgatgtaatccatacaagttcaccatggtcaagagcagggtggagcgtgaatgggaagggatcccacacacagactgcccttgtgctcatctagggccacagggaaggcggtcgtcaccgaagaaggtctaagggcgtagcagaaggcaaaatgtgaaagagagttccatttttattataacctgcagtcttttcttgcacaacatatgggttacttgaactacctgattcaaccctaatttttggcttgattcgaaagctttagtgtaaataacaaacaaatgctcatctaatttatatcaatggctagcactagaggggagagagacagagcaagaaaatataactgggggagagaaggaaaaagagaagaaacaaatgagatcttaataatttgggagaattgtggccttttaagagtgctctggcaattgaggaaaatcagaaattaatggctataggccgagcgcagtggcttatgcttataatcccagccctttaggaggccaagggggtggatcacctgaggtcaggagttagagaccagcctggccaacatggcgaaactccatctctactaaaaatacaaaaattagccagctgtggtggtggtcccctgtagtcccagctactcaggaggctgaggcaggagaatcatttgaacctggagggtggaggttgcagtgagatgagattgcaccactgcattccagcctgggtgaaagagtgaaactctgtcaaaaaaaaaaaattaatggctacagaatgcaatcaaatggctatattttaatttcattcgcttccttacactaacatgatgggatgacaggtagctggaatcagtgagctggctcctttagtgcataaagagtcggctgcagctgcatctgaggaccagttgatccaattctttttctttttttttttttttttgagacagtcttagtctgtcacccaggctggagtgcaatggcgtgatctcagctcactgcaacctccacctccctggttcaagcaattcccctgccttagcctcccgagtagctgggattacaggtgcacgccaccacacccggctaatttttttgtatttttagtagagacagtatttcaccatgttggccagactaatctcgaactcctgacctcaggcaatccgcccacctcgacctcccaaagtgctggaattacaggcgtgaaccactgtgcccagcctctcaatgtaaaattcttctatcagcccctcactttctttctgagctctcctttgtttccccacagttctgttcattttttttttttatacaactggaggaagatggctaagactgatcaccagggctatgctatagcccttagggaataataggttttagcgtctatgccaaacatgtaaatctcccttttaactaaaagggtattttctaaacacagcacagactaatcagaaagtgagttttgtgacttctgaatctggaataatatcagagatgcttaagattacaaatcaagtattcttggagagattcaagaaacatcgtatccatagctgaaggattgaaagataaaggaattcacagaatatataatcaaataagtaagaaatgtaaatggccaaagaaaagacaagaggcataggtccaggaggtccaacatctgactaataggtggttcaaatatacagggaacacaaaataaagagaaaaaatcattaaaaaaaaatacagttgactgagcacagtggctcatgcctgtaatcccagcgctttgggaggctgaggtgcgtgggtcatttgaggtcaaatgttcgagaccagcctggccaacctgatgaaatccagtctctactaaaaatacaaaaattagctgggcagtagtgacgcatgcctgtaatcccagctactcaggagactgaggcaggagaatcacttaagcctaggaggcggaggctgcagtgagccaggatcatgccactgcactccagcctgggcgacagagtgtcaaaaaaaaaaaaaaaagagagagagagagagaaaagaaagaaaagaaaagaaaaaggaaggaaggaaggcagcaggcaggcaggcagacagacagcaattgtcactgcactccagcctgggcaacagagtgaggccctgtcaaaaaagaaagaaagaaaaggagagagagagaaaggaaagaaagaaggaagaaaggaaggagaggagatggaaggggaggggagggaagaggagaggaagaagggagggaatgcaattgcccagagctaaaagatgaatcttcagattggaagagcatactaatttcctggcacaagaaatgaaataatctcacaccaaggcttaacattgtaaattatcagaactccaaccttcagagaaatttctaaaagtttcagagaagagggaaaaggtgcaagaatcagatcacattagacttctcatcagcaacctgacttcagaagccagaaagctcaaagttcagtgggcaggtgattttcagactagagttatatacccattccaatcatgatccaggtataattgacattttcagatgtaacagaacttgaaaattttatcttttacgtagcttttttttttttttttgagacatagtcttgctctgtcacccaggctggagtgcaatggcgtgatctcggctccctgcaacttccgcctcctggtttcaagtgattctcctgcctcagcctcctgagtagctgggattacaggtgtccaccactacgcctggctaatttttgtatttttagtagagacggggtttcaccaggttggccaggatggtgttgaactcctgacctcaggtgatccacctgcctcggcctcccaaagtgttgggattacaggtgtgagccaccgcacccggccacatagcttttcttatttgaaaatatgctacaataagaaatgtagaaagataggtcactataaaagaaaagcaaatatttaatatatgaaaagattctctgccatgctcatttttaaactacactaaaaactaatagctcacctgtcaccctgataaaatccagaagtttgacaacatgatctgttttccatactgttgcccaagaaaacaggcactttcatacattgttgatagaaatgcaagatattataacctctatggaaaggaatttggcaatatctaacacaattgcatacatatgtatcctttctctctctttctcacacacacacacacacacacacacacacacacacctcacatctaggagctgattccaaaagtacactggcaaaaatatggtaaaacatgaacacaagacattgcagcactacttgaaatggaaaagactgaaaacaacccaaacattcatcaactgggaagtgaatggataagctgtagtacaaccacatgatgggaacattacgtacctgtgaaaaagaaagaggcttatctctacatgccatggaggggacaccagaataaacggttaagtaaaaaaaggcaggctgggcgcagtggctcagtcaggcctgtaatcttagcactttgggaggccaaggtgggaggattacttgggtccaggagttcgacaccagcctgggtgacatggcaagaccctgtctctactaaaaatacagaaaaagttagctgggcatggtggcacatgcctgtagtctcagctactcaggatgctgaggtgggaggattgcttgagcctaggaggcagaggttacagtgagccaagattgagccactgcactccagcctgcacaacagagcaagaccctgcctcaaaaaaaaaaaaaaatgtttttttttaaatgtaatttgccaatggacatctaaaaaaaggtagggggaagacattaatacacatacatatttacttatatttttaaaaattgaaggatataccaaaaacattttttaaaagtgcctacttagctgaaagtaacagaaacacagaagaggaataggaactacggatccacaagtgtaccttgtcttgtatatttgactttggaatcatgtaactatttgacataaatataaaacaaaatctttttttaaaaaagcaatctctaaatatgtagatattgaatatatctagtggatggcatagctgcatggagaagaactattttgagtaattttaaaacatgaacttgactatacgtatctcatgagatataccctaagtaccaaaataaataaatacatttctaccatctctttcccaaaaagattttaaaccatttttagtaagcatgttgttgttgttagaattgatattgttagctgcaaaaaaataaaataaaatacttaggaatatacctaaccaaaaaggtgaaagacctctacaaagaaaactacagaacactgctgaaagaaatcatagatgacacaaacaaatggaaacacatctcatgctcatggatgggcagaatcaatattgtcaaaatgaccatacttccaaaaagcaatctacgaattcaatgcaattcccatcaaaataccaccatcattcttcacagaactagaaaaaacaatcctaaaattcatatagaaccaataaagagcccacccagccaaagcaagactaagcaaaaagaacaaatctggaggcatcaaattgcctgatttcaaactatgctataaggccataatcaccaaaacagcatggtacttgtataaaaataggcacatagaccaatggaacagaatagggaacccagaaataaacccaaatacctagagtcaactgatctttgacaaagcaaacaaaaacataaagtggggaaagggcaccctattcaacaaatgatgctgggataattggcaagccacatgttgaagaattaaactggatcctcatctctcaccttatacaaaaatcaactcaagatggattaaggacttacatctaagacctgaaactataaaaattctagaagataacattggaaaaacccttctagacattggcctaagcaaagatttcatatccaagaacccaaaagcaaatgcaacaaatacaaagataaataggtgggacttaattaaactaaagagcttttgcatgacaaaaggaaaatcggcagaataaacagacaatcctcagagtgggagaaatctccacaatctatacatctgacacaggactaatatccagaatctacaaagaactcaaatcagcaagaaaaaaaaaaaaatttcatcaaaaagtgggcaaggacatgaatagacaattcttaaaagaagatatacaaatggccaacaaacatatggaaaatgctcaacatcactaatgattagggaaaggcaaatcaaaaccacattgcaataccatcttacccacacaagaatggccataatcaaaaaatcaaaaaatagtagatgttggcacggatgcagtgaacagggaacacttctacactgctggtgggaatgtaaattagtacaaccactatggaaaacagtgtggagattccttaaagaactaaaaccatttgatccagcaatcccactactgggtatctatccagaggaaaataaattattatatgaaacagatacttgcacacacatgtttatagcagcacaatagcaattgcaaaaatgtggaaccagcccaaatgcccatcaatcaatgagtggataaagaaactgtgagagagagatatatatatattccattatatatatatactgtatatatatacagtatatatattccattatatatatatactgtatgtatataccattatatatatactgtatatatacagtatatatattccattatatatatacagtatatatactccattatatatatacagtatatatattccattatatatatactgtatatatctactgtgatatatatattccatatatagtccacatatatatagtccacatatatatatagtccacatatatatagtccacatatatatatattccacatatatatagtccacatatatatagtccacatatatatatagtccacatatatatagtccacatatatatagtccacatatatatatatatagtccacatatatatatcttccacatatatatatcttccacatatatatatcttccacatatatatattccacatatatatattccacatatatatattccattatatatataatggaatactactcagccacaaagaggcatttgcagcaacctggactggattggagactattattcaggaataatagtaattcctgaagtaattcaggaatggaaaaccaaacattgtatgttctcactcataagtgggagctaagctatgaggatgcaaaggcataaaaatgatacagtggattttggggactcagggggaaagggtgggaagcgggtgggggataaaaaaccacaaattgggttcagtgtacactgctcaagtgacaggtgcaccaaaatctcacaaatcaccactaaataacttactcatgtaagcaaataccacctgttccccaaaaacctatggaaataaaaagtttttgaaaaaaagaacaaaaataataaattcttccaaagacaaaaaagaattgatattgctattctggggtcgtttgtgtgtacgttgtatattgagtaattatgttagtcttgttgggaatataattttaagttttggagaaagagatacagctaagaaagataaggttaagtaaaaactccatgcttgtgattttgaagtggaagcatcagtatgaactcatgctattttttatctcaaaaaataaatattttctagctctctacattgaattggtctaaacattataaccaacccagtagcaacaagcacccctatcatctagaccatgatagctaaataccattttctactaagaactgggattccttggagaaatgactgaattcaaggttcgcgggggtatccaatcttttggcttccctgggccacactggaagaagaataattgtcttgggccacacataaaatacacaaatagtaacaatagctgatgagctttaaaaaaaatgcaaaagaatctcataatgttttaagaaagtttatgaatttgtattgagccacactcaaagccatcctgggccacatgtggcctatggcaagcttgttctaggacaagaaatgtacaaaatgtacatagatttaagttcaaaaatgcattttatatatatatatttctgagacagagtctcactccattacccagtctggagtgtagtggcatgatcttggctcactgcaaccttcacctcttgggttcaagccgattctcctgcctcagcctcctgagtagttgagactgactacaggtgtgcacaaccatgcttgactaatttttgtattattttagtagagacggggtttcaccctgttggtcaggctggtcttgaacttctggcctcaagtgatccttctgcctcggcctcccaaattgctgggattacaggcatgagccaccgtgcccagcctcagaaatgcataatttttttaagcttcttattatttactgttggaagacgctaggcagggataaataggtgcagcataaaagactttcagggcagtgaaactactttgtatgatacgataatggtggatacatgttattatacattttcccaaacccgtagaatgtacaacaacagtgaaccctaatgtaaactatggactctgggtgataatgatgtgtcattgtcattgttggttcatcagttgtaacaaatgtaccactctgaggcagcaggtggataatggggaggctatgcaggtgtgtgggctggaggtatatagaaaatctgcccctttttctcaattttgctatgaatataaaaccgctctttaaaaaaaaaggtttattagaaagagagagagtaagaataggaaagagaagatacctgtaaatttaacaagacttcagagacacatctcccatcaagcaattgcaacacatggcccttacttgctcccaatttgagcaaattaactgtaaaaaaattatgagacaaataaggaaaatgtgagcattgactagatagttgattcaattaaataatattcaggtgggataatatggttttgtttaaaaaaaaaagccctcctgcagagatacatagagaaatatttgcagatgaaatgatatattttgaatttgcttcacagtaatccagggttggagacgtgggtagggttacagatgaaactaaattggccttggccatgatttgataaaaactgttcaagttgagtgatggttacatgtgaattaattatgctttctcactgcttttgcaaatgttgaaattatctatgataaaaattgagtttttatcaaagttatgcaaattttgcatgtactctgatatacacctatgtttgtttcagtattaaaatgtaactttttttcctttgagatggagtcttgctctgtcgtccaggttggaatacagtggcgtgatcttggctcactgcaagcttctcctcttgggctcaagcgattctcttgcctcagcctcctgagtagctgggattacaggtgtgcaccaccacgcctgactgatttttgtatttttagtagagacagggtttcaccatgttggccaggctggtctcgaactcctgacctcaggtaattcacctgcctttgcctcccaaattgcaggtaattcacctgcatttgcctcccaaatgttggctcccaatggctgggcatggtgtgagccaccatgcccagccattaaaatgtaacttttatagcaaaaatctttaataaaaacatggacactccagaaagaagtgtgtttattttgaggatttatattcccaggatgtgacattgtttgcccagtgcagaggctgattaatggcccccaaaaatatctacattctagtcccctaagcctgtgcattttactttatgtggcaaaagggactttgcagatgtgattaaggattgtgagatggaaaaattatccttgattacctgcacggacccagtataatcacaactgtccttataagaagaggagctttggaagaagagagagttgactacggaagagggaaaaggtgatgtgataatgaaagcaggggaggacggcagtgtggtgggggccatgaaccaaggaatgaggacagccccccgaagctggaaagggcaaggaaacagattctctcctggggcctccagaaggaaccagtcctggcaacaccttgtttgagtcccataagactcattacaggctactggcctccagaactgtaaggcaaaaaaaaaatagaaattgacataaggtaagacaccaaatctatgttgttttaagtcaccaagtttctagtaacatgttgcagcagccatagcacactaatgcacccaggttgcaaatctcaggggtactggaaacagcagggcctggagacggctgtatctggctgtatccagctctttgcctggaaaatgaggtcccaccacctgagaccatagtattgtgagaattgcctaaagcacctcgtccaggtcatcgttcaataaacgtttgtgccgtctccctctctagatttctcccttctacctttctctccacactcaatctgtagttgtgatgatcactaatgtaatagaaaacatcctagaaaaaagaacttcaccttcaagacttgggttacaaattaaagggagaagaaaaacaatgctaacagtcaaggactttgaggtatttgttaatataagtatgtcattattatcttagagttaaccttgacagcagtgtcacttcttactaatgtcaaaggggcaacatttttttaaattgtttttctactaggggacttgcatggatcttttttttttttctagtcagtctctgcttatccatcatggatattttaaaatccagattattatcagacaaataaattcaacttaataatcagtattttgtcagacagaagtaaaaattccaaactaataaaattatgctcaactggaaaatgtaggaaggtctttttaattttatccattctgtagaggtatctactggttttgttttttgttgtttgcttgttttttgagacagagtcttactcagttgcccaggctggagtgcagtggtgcaatctcggctcactgcaagctccacctcctgggtttacaccattctcctgcctcagcctcccgagtagctgggactacaggcgcctgccaccacacctggctaatttttttgtatttttagtagagaaggggtttcgccattttagccaggatggtctcgatctcctgaccttgtgacccacccgcctcagcctcccaaagtgctgggattacaggcatgagccgccgcacccggacaggtgtctcctgattttaattgcatctccctgatgactaatgacttggagcactttttgatgtgcgtattggctattcacatatctttctttataaagtatctgttcaagtctatggccagttttttaattgggttatctgtctttttattattgatgtatatactcttggtataaattccttagtagatatataatttttaactttctttccagtatgtggcttgcctattcattttcttagtaatcactttcgataaacaaatgttttaaatttcagctgaatgtaatttatcaatatgtccatttctacagtttgtaaagctgctgggatgatgattgggattgcagggaacacgatcaatttggggccatttaacatcttaataatactgaatttttcaaaccataagctggtatctctctccatattttaggtcttatttcgtctctctcagtaacattttgcaggttttactcttgcatatcttttgttaattttattcctatgtgttttataatttttgacactaacagaaaacatttatgatagtatcaaaaaagcattaattacacttaaaaataatgtgtattctgcaactgttgaatatagtattctatccaaggcaactagatctagatgatggatagtggtatcactactggcagcaaattcatacgggtctgcagcaacctcaattcttgcctcctcagaaggaagaattcaactaaggggcataagacaggaaaagcgcctgaagcaagttttagaacaggagtgaacgcttattagaaagctttagagcaggaacgaaaggaagtaaagtacacatggaagggggccaagcgggcaactggcgagatcaagtgcacaactgggccttttgtctttgggctttatatgtgggcatacttctggggacttgcattccttctcccctgattcctccctgggggtgggctgtccacatgccatgcttgagcccactcgcccaactcctgagatcctatcaggaagctgatgaccagttttaggtgttttctatctattgggattctgccttttcttggcgccgcctgtgaccaattattactttagagagatagttaacaacagcctaaccatcacttgatgtttgcccgacactcctggtgtatgtgtagggggagccctctcctgccttgctcatacctgactagctacccattataacagtattagtctgcttggtctgcccaactagcccaaagtcccagagtaggtgtcttaacagaaatatggccaggagtggtggttcatgcctgtaatcccagcactttgagaggccgaggcaggcggatctcctgagatcaggagttcgagaccagcctggccaacatggtgaaaccccatctctaccaaaaatacaaaagttagccagacgtggtggcacctgcctgtaatctcaactacttgggaggctgaggcaggagaattacttgaactcaggaggcagaggttggagtaagccaagatcacgccactgcactccagcctggacaacagagcaagactccatctcaaaaaacaaaacaaaacaaaacaaaaaacaaaaacacagaaatgtatttcctcacaattctggaggctggaagtccaagatcaaggtataagtgggcctggtttcgttctgaggccccttgcaattgtcaatggccatctcctccctgtgtcttcacatcatcttctttctgtgcctcggtggtatcccaacctcctcttcttatgaagacaccagtcatcttggattagaacccattgtcatggctttttaacctaattatctccttaaagatcctatctccaaatacagtcacattctgagatactgggggtgaaggcttcaacttaggaatttgggggagcacaattcagcccagaatagtgttatttgcacagtgttgtacacacctgggagacatgtgtacagcagtgtacacagaaacatctggaagtacacaggtgggtgcatggtgtgggggatgtctttgtgatattttgatataagaaacatgtagagtcatgtgtcacttcacaacggggttacattgtgataattgcatcgctaggtgatttcgttattgtgtgaacatcagagagtctacttacacgaatctagagggcacagcctaccacacacctcggctgaacggcctagcctattgtctccaaggctataaacctattgttactatgctgaatactgtaggcaattataacacaatggtaaggatttatgatagtattatgatattattagtgttagatataaacatatctaaacatacaaaaagtacagtaaaaatacactataaaagatttttttaaaaatagtacatctgtatagggcccttaccatgaatgaagcctccaggcctggaagttgccctgcatgaggcagggagtggtgagtgaatgcgaaggcctaggacattactggacactactgtagactttataagcaccacacttagcctatactaaatttatttataaaataaagtaaatgtgcaatgatgttatgttggctacggtgtcactagtgataggaatttttcagctccattataatcttatgtgaccactgttctatatggagctggtcattgatggaagcattattagtcagcatttgactgtatttgatctttgtccctggtagcacagaactcataaaacttgcaatatctgagtaatggggtaagagaagcatcttctgttaatcagcataagccactttcaactctacctgagtttatgccaatgaggtgggggctagttgtcagaggaaccaaccatatattagagggttgcaatgttcactcccaccctggaaaggggagagaggctggggattgagttcattcactgatagccagtgatttcatcaatggtgcccacataatggaatataataatcatctagatggcatagcacatgataaaaccctacaaaaaccctcctcaaggggcttcagagaacttccaagttggtgaacacattgaggtgctgggagggtgtgcacctggatcaggcgtggaaaaatccgtgccctttcccacaccctgccccatgtgtctcttccacgtggctgttcctgagttgtattcttttatgacaaaccagtcatctagtaagtgaactgtttgacctgagttctgtgtgtgagccattctagcaaatgacatagtgtcaggattgagttacattgtaggacacccagcgagtgtctaccaagaataggaaattgcttggtatggaaaagcccacaagtctggcgtcagaaatgtacggtgtagcgggagcagaggttttattttacttttcaagtagatattttgcccctcacttgggaaacacaagagcctcattcctccccttctggtcaactgaactaccctcaaagtgctccccaaggaatgcctcaggcgtggcaggcctcagcaaaaccagcggaggggctcaagttatctgggtggactgtctacactgtcaatacccaggtttactctgatactgtagacctgaatcaagaacacaagaaagctgggcgtattggagggaaaggccatgtaagccgtgtgttttggcctcctaattctcaaaggctaaattctagggttcctctcacctgtggtcctgctcattccagatgttcagaatgttcctcttgttagtgtctgaggatctcagaggagggtgtataatttggagtcaagctctacagaaacccagaagaatctgcgtcacgtgtggtatcagccaagagctgagtggactctatttcccaagagcttggaccacatggggttgtgtcagagataaacagccttttgagtctgaacaaatgcagccggctggttggttcttggggggcttagatataagtggagaggtgcactctgttggggcagggggctctcttttggttttaattaactggctatgagtacatgacagaggtttacaagttcacggctggcatcactcgatttctgccctcagatattgaatctaagccagcagtttggtggttgctcaatagcatccagaattgcttaaatgtaagtcaagggcactgtcgggcttacattttggttcttttaacttttcaagtatttaagacaaaaagcgattgtctttccagccctattgggcatcttctaaggggccctgggcgactatttcccgcccagctccctgtcctcacacagagagggatcctagggctgccctggaaagccgttctcctgcctctctgctctgtgtgctttggagttttatcaagaaggggcagatgggaagctctgctggatgctggcgttgtgagacacacccccctgacctttcttccagccaaatagctctgataagtgggcagaccttgagcctagagacccacagacacacttggacgattcctgcagaaatcagtgaggcagtctcctcccaggggcttggcgcctggctcgaggcgaggctgccggcccggacgctgactgcccagtgccacagacatggccaacgggaccaacgcctctgccccatactacagctatgaatactacctggactatctggacctcattcccgtggacgagaagaagctgaaagcccacaaacgtaagtctgaactagggaagccggtcagacagaggctgggggccggggcccaaatgactgggcactcccggctttctctgcattcacttattaactccggtagacatcatgggaaagcaggaatgtggccagttcactcatagatataaatgaatggggctgggagagaaactgtatttgctaacttctgtaataagcttggaattaacctgctaagtcacgaagacactttggaagcagaatttttattttttactttattttattttattttggagatagggtctagctctgttgcctaggctggagtgcagtggcgtgaccatagctcactgcaacctcgactgccctgggtcaagtaatcctcctacctcagcctcccaagtaactgagactatgggcacatgctaccacgcctggttaattttgtgtatttttttatagagacatgttatattgcccaggctggtctggaactcctggcctcaagtgatcccccaatctcggcttcccaaagtgctgggattacaggtgtgagccaccgtgcctggcgagaatattcttttaaagatagatttcttgtttaatttgtttggggctccaataagctgagcgagtttcctcaaattaaagatttgccttttccactgtctgtatttagatttgggacagttattctctccatccctaaaatgcagatttaatgatttttactaaaatgccaacatacgtttaatcttcatagtctcagcaaggacaaaccagcatgacttcacttctttttgctcatctgccctcgggttccttatctcttggctaacgtggcatgtgtggacaatcttctctgaggagtccagctacttgatcacaatgacaaattagatgcggaagtgagcatgagaaacaaaacaaaaacaaagcctgggaagattgggtctcagccctggaaacccatgcgctacctatcccgtaggaagtcttagcttccttgggttttcactcactataatcacatactgtctgtcaaacagtaaatgcagggctgggtgcaattgctcacgcctgtaatcccaccaactagagaggatcacttgaggccaggagttcgaggccagcctgggcaacacagtgagatcccatctccacacacacacagaaaaagtaaacgcagaccaggcatggtggctcatgcctgtaatcccagcactttgggattacgtcgtatgtcagatgcgtcatgtgtcatgcatcctatgtcaggggcgtcacgcgtcctatgtcagatgtcacacatcctatgtcaggggcgtcacgcatcctatgtcggatgcatcacgcgtcctgcgtcggatgcgtcatgcgtcctatgtcagatgtttcacacgtcttatgtcaggggcgccatgcgtcctatgtcggatgtgtcacgcatcctatgtcacgtcatgcgtcgcatgtcagatgcgtcacgtgtcctatgtcagatgtttcacacgtcatgtcaggggcgtcacacgtcctatgtcggatatgtcacgcgtcgtatgtcagatgcgtcacacgtcctatgccgggggcgtcacacgtcctatgtcggatgtgtcacgcgtcctatgtcaggggcgtcatgcgtcctatgtcggggcgtcattcgtcctatgtcagtgtgtcgtgcgtcctatgtcaggggcgtcatgcctcctatgtcggatgtgtcatgcatcctatgtcaggggcgtcatgtgtcctatgtcggatatgtcatgcgccctatgtcaggggcgtcatgcgtcctatgtcgggtgtcatgcatcctatgtcggggcgtcatgtgtctatgtgtcatgatatatcgtgtatgtcatatcaatgatatatcatgatttcaaagatgtatcatatttcatatatcatgatatatgatatgatgatatatcgcatatgtatcagatatatcaaatatatcatatgatatatatcatatcatatatccatatatatcatgatatatcgtatatgatatcatatatcatatgatatatgatggctaatttctttgtatttttagtagagacgtggtttcaccgtgttagccaggatggtctcgatctcctgaccttgtgatccacctgcctcaccttcccaaagtgctgggattacaggcgtgagccaccacgcctggcccaattaggatggattgtaaaatgtttgtgcttatgctctgatgtgtgatgtgtgggttagcaccatgcccttggtgctttctcatgatagtgagtgagttattaggaaatctggttgtttaaatgtgtgtgccatctcctctttcttcctcttgctctggccatggaaagtgctggctccccctttgccttctgccataatcgtaagtttcctgaggtctccccagaagcagaagctgccatgcctgtttcctgaggccctgcctgaattgactaattacatgtttgatcttcatctgtgcccttttccgaggctaagcttagaagaaaatcaatcttacagcagcaatacagattattctaacatagtgagtctccagataccagcctaatgctccctttcagagagtaggatgggctgatttcccttgagtagtgcctggcttaatgctctattatttacctctcaggtcaatatatctgcttccctttagttatgggttaagaagaactggtcatagtccatattgacctctgctgtcatggtggttcaatgagacagtctgttcctctgcttctctgagcacaggacgcaagagaacaaaatgacactgtcaaccaatttctctgcacacaatgtagaaaattcaaagtatagattaaacaaaacgactacataaaactctttttctctcattcagagcaatcatattcagggcatgacataagtagtgaaagtaatttttaaacaaagataacagaatgtgtatctgtaaatgaatttccatcaaggtagcaccaggggcaggtgcaacacttgaatgactctactgttgctcaacaacttcttgaactgatgttgttgggtggccacaaaacattctagcaaacatctgtggtgataaattgtgtatatcttttgaggatgaattttctttttggaaatagttaagactgacccagaaaaaagtcaggttaatgaaatgggtgattaagctggttgataccatctggatgtcataaataaactatctcacaacatagcaaaattgtgtctatgtgtgagtccttgaaggtaattccaaaagaagagacctgtaagtatttgatgaatatatgtgttttagtaagaattctatgactccatggtagagagaggatgattattttgaaggtcacctttcatttggatttttaagttctggtacattcattgagaaagtccgtttctttgctgacttggtaaagaaaatggattacaactaacagagtaccagataaaacagaagttagtttatctcagtctacaggactgggctagtgaggtggctccatggagtccttaggaactcacatccttctagctcattgcactaccatccctgggacatggctgccctcatcctcaggttgcaagccatgctctgaccatcacatccgtgttcacggagcaacatggagtaagggaataagaacggacacacggtgctagaagtctagtaacccctggagggaggctcctagaagctgtcctgtgatggctccactcatatctcattggccagaaccttgtcacattgttctctgaaaaggaggcaaggaaacatagtctttaactcaggcagccaagtgtcctgctaaaagcaaaggttctatcacgacggaagcacacaagggctgaccttagagttgacagtagtaacctatgccccaattcccttttttttttttttttttgagatggagtctcactctatcacccaggctggagtgcagtgactcaatctcggctcactgcaacctctgcctcccaagttcaagctattcttctgcctcagcctcccaagtagctgggattacaggtatgtgccaccatatctgactaattttattttgtatttttagtagagacggggtttcaccatgttggccaggctggtctcgaactcctgaccttaggtgatccacccaccttggcctcccaaagtgctgggattacaggctgaggcaccatgcccaaccacatcttgattttctgctggaactctggaacccaaacgttagtagaatgaagaatggaggaatgctaaaactgtttatttaacaaaacagaagtgtctactataagaatgaacccttagattggattaatttgttaactccaagttaggataagaatcctcccaagatgaagtgcagcctggccatgccatccagaaccattcctgtcactccgctgctgaggactaattcccctcattccaccagtgtggacccagaggggaaggagagaaaggaaggagggaagagaggagagagggaaggaaaggaggaaagaacaggcagggaggagaagggaggataggagagaggaaaggagataagtttctatggctggaccactttcattgtcaacccagcctggggctccctgttgggaaaaccagcctagggatgtctaactatttctgacactggagagtcacacagctcttgcttttggaatgaaatgttctctccaagcacttgggtgaaccttcagaaggaagaggaaaaagaatgatattctcttgcctattttttttcaacagaacatgatgaaggagattttagtaaagaaaatgactattggctgacgattgccttttggtctgacaaaacttaaactccacttatatgaagacactgcgttctgtgaaacctgtcatcttatttcttgctcaatatctggggatgacgataaggactcagacaagtgtcagtctgggagaaaggggctctcaggtgctgagtttgaagctgttcccttagatccctggtagaatttatgtaggtgctataagacctcaaaccctgcactatttttaggaaggaaaaagagcattagtgtccgcagaaacctaaaatatccctacagaataaaacttccaatcccattttctgacagcatatgcactcttttactgtaagggttgtaaaatagattgtaactcttcgggagtgtaggacaatgcacagggggtgggcaaggaaggctaagagagtcagaggcttctttcaaaaatccttaagctggctgggtgcggtgactcacgcctgtaaccccagcactttgggaggccgaggcaggtggatcatgaggtcaggagatcaagaccatcctgcccaacatggtgaaaccccatctgtactagaaatacaaaaattagctggatgtggtggtgggcacctgtaatcccagctactcgggaggctgaggcgggagaacgacttgaacccggcaggcggaggttgcagtgagccgagattgtgccactgcactccagcctggtgacagattaagactctgtctcaaacaaaaaaaaacaaacaaaaaacaaaacaaaacaaacaaacaaacaaaacaaaccaaaaaaactccttttaagcttaggacacacagttcaacctcatttccctttccccaggaatccagaggtgctcttaaacagttccctgctctaggggactgcgtcagtttctcagctcggagacagacaggagagacatgagagccagcctgggggtctttgctgtccctgcccccgtggagtgtaaatgccaagttgctgatgaattacaaggcaatggatgctcatgattctttcgccaatactgtgccttttcattataccctgttttgagggggatttgttttttttgttgtttttttttttttttttttttttttgagacagcatcttgctctgtggcccaggctggagcacactggcgtgatcgtagctcacttcagccttgaactcctggcctcaagtgatcctccgaccccagcctcatgaaggggtaggactatgggcattaccgtgcccaggtaatcaaaaaaatttttttttagacatggggtcttgctatgttgtccaggctggtctcgaactcctggactcgagtgatccacctcccaccttggcctcccaaagtgttgggattataggcatgggccactgtgcccagcccattataccctgtttttaatgttacattttagggtccaagatcaactcttatgagtcctcagtttttcctgctatctctcaggggtcgtagatggcagagatgacatcctttactcaaataccaatcttcaccccagagcctccacctctgcctctatgtagattactctcactttattcattctttcagtggtttgcacgttctctcattcatttactcacagtgttagtgctggaagcactgcagaagttcagaggaggaggaggttgggggtggaacattgtgggtgaatgaggggagttagcaatttctaatgtgctggtttagccccctctgaatcctgaacagtccctcgcaaaaggcgctcaatgaattctcgttaggttatcatcctctaatagcgccttttggtcacacacataggcgtctagaatatctcagcttgtgacatcttggcattacgcagttggtctgggataagacacttgcagaccctaattacgagccggattgcccacagccacagacaaccaccaagaaaaactgtcgtgctagaaagtagttccatagcaactggcctaacattcccaaactggagcctggagaaggaaaaaggcccctcctggccagccaggttctacccagggccccaggggggctaagtgtgtttcctggtttccctttcccccttcagcctcaggccacaaatacagccatcatgctggtagcaaaagtgctttttccttcctgccacagcccctgagatgagacttcctgcctgagagagggactcgctatttccaccttgccgatccaggcatgagcagacctaggctaactcccgtagagcagaaagggcctccccaccggagcgctgtagcccagcgcacatcctccgcagggtatcaactcctggggtctctgaagctgttccaccaacggcccctggtaggcgctgcatccctcccgggggcccaggagtccttcctaacacacagagctgcccacagccctctcctctccctcccatccttcaggactgttcctctgagcaccactaggagccgggcaagcagatgcatggggtgggggggcacacaattccattcagtgtttcctcttaacaatcaccctaaacagaccccgtggccagctgccctgaggaaaaagacacttcttggctcccctgttctttcccaaagttattgttaatgggagatcttccccatggtaacagctgagaggctggaggacaaccgaaactcagggccctcattccacaataccctgggactccttactgcccctcagcgttgctttatgttgacataacccagcgctgagatgcatctcctcctcccgcagattccatcgtgatcgcattctgggtgagcctggctgccttcgtggtgctgctcttcctcatcttgctctacatgtcctggtccgcctccccgcagatgaggtgggtaagaaggggtgtgagtctgtgggtcactcagacgctctccagtgagtaacagtgcaggttgagtatccctcatccaaaatgctggagaccagaagtgtttcagatttgggatttaaaaatatttgcattgtacctaccagctgagcatctcaaatccaaaaatccgaaatattccagcgagcatttcctttgagcctcatgtcagtgctcagtatgttgcagattttgcagcgtttcagattttcgggtttgggatgctcaacctacgtccctacaatggaatagtattcagcaataaaaagggatggagttctgatccatgctgcaacatgcatgaacctcaaaaacatcatgctaagtgaaagaagacagacacagagctgcatgttgtatgactccattcacacaaaacatccagagtaggcaaatcaaattctgtagagacagaaagcagattagcagctgcctaggtctggggggagagcggggaagggggaatgactactgatgggtttcttttggggatgataaaaatgttctaaaattaagctgggcgtggtggctcacgcctgtaatcccagcactttgggaggctgagatgggtggatcacttgaggtcaggagttcaagttaccagcctagccaacttggtgaaaccctgtctctactaaaaatacaaaaattagccgggcgtggtggcacgcacttgtaatcccagctactcaggaggctgaggcaggagaattgctggaacccaggtggcggaggttgcagtgagccgagactgtgccactacactccagtctgggcaacagagtgagactccgtctcaaaaaaaaaaaaaaaaaagaagttctaaaattaagccaggcccagtagctcacacctgctgtaatcccagcaccttgggaagccaaggcaggaggatcgcttgagcccaggggttcgagaccctatctccataaaaaataacaaaaagttagctgggcatggtagtgcgcacctgtagtcccggctactcaggaggctgaggcaggaggatcactagagcccagcaggtcaaggctgcagtgagctgtgattgcgccactgcactctagcctgggtgatagaacaagaccctgtctcaacaaacaaacaaaaagttctaaaattagattatggtgatggttgcacaactctatggatgtactgaagaccactgaaattgtactctttaaatgagtcaacctcatggaatgaaaatatatctcactaaagctgttaaagaaaatgaagccaacttgacaccatgggcattaagtcttgccggccagctcaccaggaacataagaaccttacctttggccaggtgtgggggctcacacctgtaatccccgcactttgggaggccaaggtgggcggatcacctgagatcaggcctttgagaccagactggccaacatggtgaaaccccatctctactgaaaatatttttaaaaaatcagccaggtgtggtggtgtatgcctgtaatcccagctactcgtgaggccaagcaggagaatcgcttgaacgcaggaggcagaggttgcagtgaaccgagattgcaccactgcactccagcctgggcaagaagagagaaactctgtctccaaaaagaaaaaaaaaagaaaaaagaaaaagaaagatccttaccttaggcacctatggccagcatctgttctcagatgcctgctgtgtgccactaaattggaggtgaaatccaggagttttaaggagtaattggaacccaccttgttttatgttaattctgttgtgctagaggattggctgacacatccaatgttcccttctaggctaatcagccctcacagctgctgctctcctaatgactgttcttaggagggaccctatattttgccatcgctcacccgaagagggcctgtccagtggctggcccatgcccttggaaacgtgtgccctggcaaaagagctgggactggtcagattctcatctttggaatttggaatctagaacctgagggatggacctggtggctatgggggctgcactgattggtccaggaggaggactagggctgggtgccattatagaccattatgtccattacggacggaagtcttggggactggaaaccctaagcgtaggaagctggtcagcagagagatgagccaaactgtgctgaggaagagctgagtggccttggagcccctgagccagtgcgtcccatgccaggtcccgtgaagagccgtggactcgcgcattggcacagcgtcttagtgttttctgttgctgtaacagaatacctgaggctgagtaatttatgaagaaaagaggcttatttagctcatggttctgaaggcttagaagtctaggaagcatggcaccgacatctgcttagcttctggtgagggcctcattttgtaaaaagatctaattcagtctagagaaaaaaaaaactcattacctcttaaaggtcccagctcccagtgttgccacactggggaccaggtctccacgagttttggtggggacaaaccataccacagcccaacattaccttgaaggggcctctgattctcctccccgcccctgcctgccctgcccgtggtgtctcacccaccagggctacactcgccaggccatttccgctcacctttggtcacatatggaaggtagctttagagcaatgaagaaattcatttttttttttttgtttttgagacaagaatctcgctgtgtcacccaggctggagtgcagtggcgtgatctcggctcactgcaacctccacctcccaagttcaagctattctcttgcctcagcctcccgagtagctgggattacaggcacccgccacgacgcacagctaatttttgtatttttagtagagacagggttttgccaagttggccaggccagtctcaaactccagacctgtaatcctagcactttgagaggccgaggtgggtggatcacctggggtcaggagttcgagactggcctggccagcttggcgaaaccctgtctctattaaaaatacaaaaattagctgggcatcgtggccggtgcctgtaatcccagctactcgggaggctgaggcaagagaatcgcttgaacctgggaggcagaggttgcagttagccgagatggcatcactgaggtcaggagccactgtgcacagcctgaaatctgttcttttctttcagtttttagaactcacattcaatttaagcacatttttatacccaagacacatctgagggataaacgagtgatgtcacctttctttactactcttctgagatgacctgcagccgccctatgccagggaaggtgcaaagatccctggtctggtccggcaagcccaggggctgcctccaccacgcccagctccctggggggcacaggccttctgggctatttcacaggggcaaactgatgacactatacatcctgaccagctacatggcttactaaagaaaatgctctcaaggcacttggtaacattcctggaatgctcagggcggcaaagtggatcctcagcaagatttaggagtcattccctgaggagctgacaccttcccatgatgggggggggaggggaggagggaggtggggagagcattcttaggcgagtgccatctgaaagcatggcctctgcccagtgggttcatcacttggtactcttcatttgtgccagcgctgtaaccacatttaagtcgttttatacatcatctcatttcatcctgaggatatctgtgagccaatattgtcccattttatggatgacgttaaaggcagctgggaagtggtggccagagctcactccagatggccatgtccactgccccagcacttcccgggcaggagaatccacccagggaggacacatttcttttttttttctttttttttttgagactgagtcttgctctgttgccaggctggggtgcagtggcgcaatcttggctcgctgcaacttccgactccttggttcaagtgattctcctgcctcagcctcctgagtagctgggattacaggcgcccaccaccacacccagctaatttttgtattttcagtagagacggggtttccctatgttggccaggattgtctcgatctcctgacctcatgatccacctgcctctgcctcccaaagtgctaggattacaggtgtgaacctccatgcttggcacagggaggatgcatctctagccaagtgttttagtttgttctcggctgctaagaaagacatatccgaggctggataatttataaaggaaagaggtttaatggactcacagtttcacatggcgggggaggcttcacagtcatggcagaaggcaaaggaagagcaaagccacatcttacatgacacaggcaaaagggcatgtgcagggaaactcccctttataaaaccatcagatctcatgagacttactatcacgagaacagcatgggaagacccgcccccatgattcaattacctcccactgggtccttcccacgacacgtggggattattacaattcaaggtgagatttgtgtcgtgacgcagccaaaccatatcaccaagatacaagttggcttgggctatggatataaaatgaactacactcagatacagcgctggatgggaggtcaacctgctcccctccaccccccaccccccccatcctaaatcaatgtaggaagaagtggcctccagggaaagacctgaggcctagttcctgacaaagcacttcctctcctctgagatttctctagaatggccacctttgtgagctggctgacccttctcaggaatttgcctgtgtggccttccctatggggtccgggcagatggcaggtgtggcaggaaaccccccagccccacagtatggactgttctgcagcaactatgatgcctgcctcccactctgctctgttcacaggaacagccccaagcaccaccaaacatgcccctggagtcacggcctcaacctccacctctgcatccagaagtgcctgccgtgccacagggaacccctggcaacctcacaggctcaggcgagctcagtggagccagggagcagaactggccctgaccagccgctacgacaggagagctcctccaccttgcccctcgggggtttccagacccaccccactctcctctgggaactgaccctcaatgggggtcccctcgtcaggagcaagcccagcgagcctccccctggagacaggacctctcaattgcagagctgatgtcagtaaatcgtggccatagctgagtgaactggtgaaatcaagccaacctggacacatacgttcctcgttcttcttagaggccatttgcatgtagcagaaagggcacctaggtcaagtgcaactagagcaggagcatcctatgcctttgacaaagattgcagtggcccctcgagtgcagaggtcatcccaggtgttgctgagtttattgagcacacctagcctgcttgcttactgcttatatttgctcagggaagagtaggaaaataaaatatatgcaaatcaagaggaaaagctgtttgcttactaatctttactatgccactttaccattactgtgtaatgcgttatcagccctgagttcacctggtccttctgtacctttgttaggatgctgggtaagttcccatccaagctccactaacacccgccggctcccccagatgtgatggcatctgccctgccaggtcagctcactgcagtctggggacctgagttgcaccttcaacctccccacagcctttcaaagacagagcccaagaaagtgtctcccctggagggcaggcagccaacgcctgtcagcagccaggccgggtaagcaggatctatgcccaaatgctgtcacagaacacaaagagccctggaagctggcaggaaaggtcttctggatgtgactttatgtgacagtggatctgggacccttgaaagatctagtcctctagtgcccagcagccttgtccctggagaggagacagcatcacacagcaaatctcagaagacccatatgtcccctacagctttcaggcaaggagggagttgataggttttatttttaaaataactgtgccccccgccccacttaagatatttctaatttagcattttatattttaagtcaggtgaagaccatgttcgatctattctccatgggatgagattcccttcctccacactaagtgactggaaaatacacgaacaaggtcagggcagtggatttaaaagggagaacaaagaaaagcaagactgatgagctccagagatgcagaaaagaaggtgaggtgctgaaaatgtgtcctcacttgactgagctggaactcggctttggagcatttgtcgccacctgacgtagtatgtattgacttgctgggccctaagaacctgggaggcagcttaggcctggagccagggatgaagccgtggaaatccaccccacctgctcgctgcccctccctgtgcccccagaggcatggggttcagggatattccccagaccaatgtccttccggccaatgccccctgcataaacaagcagaggtgcctataaccaaaggaatccccaaagataggccttggagaggtggataaagattaaggggaaccaggaagagaacgctttgttggagcagcgcttgcctgagtccagcttggatctaaacgtgggatttcaagttcaggatagtctcaaagaatagcgttgtaaggtttatttgggtagggaaggggacaagtgaggtaactgatccttgctttgtagacagtgcaagacaattatttgtggtgaagggactgtatgccaacaaacgttactcatgctttagttaaaactttaagtcacctaaaacagaaacaattctaaagaacactggtggaaaatagaagtgtaaatgtttcagacaaaaccaaggcattgtcagcacgatgtacattatacggcagataaaacagccacatcctaggccacagagcagatcccaagagccccaggcatgcaggagagttttaaaggaacagacggaaattttaactgtgaaaaccacgaaatttcatgacttttgtcagctacaaccccaactaatatatgaccattaagagtaaaattctgacctttaaaataaatgcaggcctatgtggagcaaaaatagcctcttgacaacaatgaaaggaaaacacaaaaaccttacaaaaatagacattaacaagcatttataaaattcaaaatcccctctttgaagtatagctttaaaaattacaggctgtcttctcaaagcagaggtcaaatcacttttattctttaaggattcagtgtaacatccttttctttaataaaataattaaacactggcagaaattaacttattcaaaaagtcatactaatactttgttatgactttttatagaaaaacaaactttatttttttatttttttgagatggagtcttgctctgtcacctaggctggagcgcaatggcacgatctcagctcactgtagcctccacctcccaggttcaagcgattcccctgccttagcctcccgagtagctggaattacaggtgtgcgctaccatgcctggctaatttttgtatttttagtagagatggggtttcaccatgttgggaaggctggtttcgaactcctgacctcaggtgattcacccgccttggcctcccaaagtgctgggattataggcgtgagccacctcacctgctgaaaaataaactttaaacatctctcttcgttttcataaaaaaaatctgataccttttgacatttcagctttaacacagatgaatctcttctgcattcagaagtgctgcctcaaactcgagctatttcctgtgatgagctccaagcccctagagaggaaggggcggcctgacgaggcactggatgggcctcatggcctagaagtccccacattccttgcaactctgatgctgggcacctacaggcccgagtttatcatttactgggcagttcaataaagtcctctcaacttttcttgtcaaagaactgagccaatgtactgaacctgttgtttcccatgccttctctggaaacccttgactcaaccaaacttctagaagctggtgctgtgctcgaggctctggtcatcagggtgcaaggtgctggccggcaggagtcaagcatctgaggctgcgctggcggcgtccttgcagagcaccacgatggcctcctcttcactgctcggggcatcatctgcggcctcacacaccatccggacgtgggttaagagggtgtccggccgctgagcccccagccagatgtcctttatgtagagagacactaggaatgctgcggaggctgaacaagagcaggggataggccattaggatgcacacctgctcagctcgaaaacaggtcatcctgcccacaatgcaacggctttgccaagtgcccaaatgaaccgtgccacaggcctgggcaacccaaggtgagcacaccgatacaacaactcactctgcctttgcttaacttttgtgttaatcttttttattattaaaaagtttcttttctttaaaaaaaaaaaaaaaaaaagacagggtctcactctgtcacccagactggagtgcagtagtgtgatctcagctcactacagcctcaactgcctgggctcaggtgatcctcccacctcagcctccagagtagctgggactacaggcatgtgccaccacgcccggctaatttttgtagagacagggtttcactatgttgcccaggctggtctcaagcaatctccccacctcagcctcccaaaatgctaggattataggtgtgagccactgtgcctggcagaaatttatctttcttctgatgaatatgtgtggatcccctcaaaaagctgttacaagacaagtctcttcctggttctgaccatccatgccaagaatgacaatgaaatttgagaagaacttcccagaatcatttcctaccatttcctcagtggcatgggtgaggaggaggagaaagcttgcaggcaaaaaggctcaattccccaactgcggccagaccagagggcaaggtcaccctgctaccaggtgagcctacccgataggctgccagcccctccctcccctgggcccccacattcctctgtgaaaggacagacctctgggttaccacacccacctccctggagctctaacggccccctggagcttgtgctactcactcattcacactgctaggctcctagtgactgccaagtacataaactgttcatgtgcgcatttatacgcatgtgaagctctatgtgcacacacacgcgcatgcacatgcacatgcgcacacatgcaagcatacgcacgcacgcgcacacacagctggccacatgtgaaacagaactcatcatgtgcctaatggtcagaaacccattgcctgcggggtggagggatgccaaggttctgaggtgccctctctgcaccgtcaacataaccagcaccaaaggtttcccctgcaagcaaaggcaaagacttccttcccttcacattcactgcccagtggcaagctctctgcaaccccagaaccgtaaggggccacctaaacaagcacaatacccagctgaggaagtcagcagaaacctgagtgttctaagcacagaaatcactcctgcccccaggcccacttctgcatctatttcttcagcctccaacaaaagaaccagccttaccttgtgtggcttcatccttctcactcagagaagacagggagagggcttccatggccgggtggaaggggctccctgcccggccctgggcagccaccagctgcagcatgaccgtattgaacaggcaggccacctcctgcacaggccctgccagcccctcagccccacagagccggctatacagcctgaatatgctgctcctcacggcactgtccttaaggaggtcagccacgaccacagggtgtggcaaaatatggctcttaagccagccaatgagtcctgcagcctctgccctgctgagcgggtgctcggccaccgaccgcagcacccaactgactgccagggaagcggcagcatatacggggcctggcgcatcgctctcggggctggctgagtccacaggctcctgagtggggtcaggaccagggatcactggtctccagtaagtcaagatggacctcaggaggcccttgcatgtctccaaggtagatgccatcagctcagggtcagccatctcctctgcctccccaggcctcctctttcggccccgtgggcctttggctcgggctggcatgacaggcttgttcttatccttgagcatttctgttaaatgcacaaagagaaggtaatgagactggggtccctcctgcccacacagatccagatgtggggaggtgtcaatgggggacacgaggggcggcttgcatgtcctgagcacccggccctgctcccacgtcaggagcctggtgagtgctcgatgtttcactacgcctgtcatcactgttattataaccaacttattaatcctcacaccatgaggtagaagccattactgtcctctttaaacacagggaatcaggacagcatcagagcttcagtccaggaggccaggttccagtcttttccttaaccctgcactacaggaggaggttggggcaagtagctcatagctacccccagcctctttacaggtgagcaccatgatactaaggtaggtgaagtgacttctccaaagacagggagctagtaagcagctgggctgaaactcaaaggctgcccagctccccatccagggctccaagatggatgtgtcccatctctgagcctcattagctttggaaatgtggctgagagacagagagagagggagggacggacagggtgagagagacatgttggctactctgggccagtcctgggttctgacactcactcatgagctcccgggcttgggccttctcaatggctgctctcaggtcttcctggagcttgaggtctctttcaatgaggctccacttgtgcaagaggacaaggacgtccttggtggaaagcactgtctcatttacggtgaatctgttcatgtccctaaaggcctgtatgacagtggcccggtacctcagcacggagtcaagtgtcccgaagaagttggtcagctggacgggggccaaggtgggcctgtttgggagtcaatgttacagactgagcaaaggctgctgcccctgcctggcagtcagcactgcggcaccctgacgacatcacacacccagaggtgcacacagtccctccaggaaccaggttttcctgcacagcagacatctagcatgggcccccaggacgcagaaaagaaaaaagtgagccactccaggaaggcacaaaggggacctggagtctgacctgcaccccacaggcacagaaacctcctgaaaccctggctaaacagggcagccaaacacacagcttgacagccagggtaccaagagcctgcgagggctccactccaggcctgccagtttcccttgcctcacagaccaccagtaaagtgagaaaaacccagggaggccctgggacagtgtcaccacccacggccaaaacctgatgaccaccaggaggaaaaagatctccctgaattccaagacagttaaagcctgtaacatcagttccacacaattgtaaacataaaaccagtattttaaatagcaactggttcttagacaccagcatgtcttccgaagatccctacataggaaaggttgactatccagcacggacttaacaatttagttttgaacaatacaaaacaaaaggccttgttctttttatcaggacatttttccttctgagattacaatcctcttgctaccaaccttctggttccggttagcataacttggctcccaaatcagaaataatgagtgtacacagtgtattttctgtaacatggtagaattggagggaaatttagctcttctgaggaaaccaaaagcatgactccaagggatcggaggaaaatactgaaacattccagagaattcatggacaatgagtcttcgcaggctaatgaaggcagaggcaagtttgggaacaccctgtcttatgttagagtcacagaaaatattttctttctaagaaacatcacttgattcaagtgtttgaatcacagtatcaaggcagatggctcgccagctaaaaatgacctcgtacgatgcacattaggtgttaatgttaacaagtatgttaagttctcggggtcttgacaagaagctttataaaattgaagggcaaagaaagagctaataaaatagatgttctgacactacctacacctgacactggtgctctgccccaatccacagcagatcacggcccagcgtccccctggtacagagtcatgactgagacatggtgtccacaggtggcagaccaacacagcatccaagaggccagaagggcccccctggcgggggcaggactcacctcaggtgcttcatgagcacgatgagaacataaaggaactcattgaccaggtgcagggcaagccgcttggcaggctcctgggagctaggctggcaaaggcgctggctctcccactccactgccttgtcccccaggttggtcacccacagtgtgtgtagcaaggagatcacattagacagcagcggagtctccagaaacctaaaaccaagcacaacagccttcaatccgccacatcctgacctttcagcaggatcagactatcgccctccataatcctatctgctcatccccctagataagcatagtctccaagtaaaaacagggtgcttgctatacaaacgcagcttccacacaggacaaggtgcaccgtcctaacagaagattgccctaagtccctccaaaaattcaggagccgctggggcacactaataaaaactgtcctgttcatgacaacaactcaatttctaaaacaagacactataagccaggaacattagctaattgtgccttttataaacctgaaacagtcttgaagttgatgtccaaatacacattctaattttggatattaatttcttccccccacccactttttttgttgtttgcagatgtacttggatatattagtttcttttagagaaatttcaggaaatgcttttaaaaaaatgcacaaaagggcctgcattctcccaggcttattatagtagttagttctttgtaagacagagccctcccgccaagtgctgtctgctgtgacagggtcttcatcttttcagacagtctcaaacagcaggagaatcaggaatcacaataaatcatcaagttcagacccctggtgctgctcctctaatgcgggctcatcactgaggacagagaccctgcactgacagcagagccctgtcacccgtcagaccggccttcctgcaagagggctgcagctgctaaagccttagagaacaggacattcacttcagagcacagaaggctgctgggacaccggggaggagtctgacctgtgcagaacagagccagacaggctggcggagactctgccagatgtgaacagcagctggtgtctgctgtcccatggcagacaagagacactcaaggaaaggctgtgaatggaggaaaggcactttggcactgccaggaacgggactgccaggcatatggtagcattggaggacactgcatttcagagagcatggattttactggacatttccaaccaacaacagagctggcagcagacgtcatcgtttctgttcctttccttcccacctgacgcgcacctcgcatgcaaaaggtacttacttgctttcaaggatgtgtaaaatccatgttaaaaggctatagtctcgtatgatttcatacgcagatctggcaacctgggcagcattctgtagaatttccagaatccaattctgaaaaccccaaacaagaagttactcttcagtgagaaaacccactttacttgattaaagaaaccgttttaaaaattaatggtatggtgccattacaggtggtggctgcaaatgaagcctgctttgctaagtccgtcagagcggtggccatgtacgaacgtgcccttccctacaagagacagccagaggacacagacttccacagcaatctctgggcccggggatccccacttccgttaatccatcatctggaacccacccacaagcaaagatgcaccacagaagccaaatggcccagatgcgcagccaccggcacagggagtgcgtgagggcccgcctccaggccagctgctggccgccagccacgagccatgcggccctgtgtttaccacctggaagggaggacataaaaatgggatggtcccctgacttgttcatggggtgcttcagaattctcacatgccatagaaaacaaaaagttactatactcaaattcagtttattcaaatgggcttcttaatcttgacttactcctatttacccacattttacatatgagaaacaaaagctgactacgctagaaattaatcaaaatactaaaagcttttcctatttccttctaccacctacctgtaatatttagaaggtacacacaccagctcttggttcctgactggctaggtgaggctgtctgtttcaacctgacccttgctttctaaatgagttctgacaacccccaacttctgtagtaggtggaatcctggtgattcaaaagtgcctcagagtacctcagtcactgacagggggtttctagacttgtgaccactctgaaggctcatgattactgatcagtaccccccactgatggccttcgtatatgccaagggccgtatacacagtaggagggttgcagtgaagagtatttagaggacaaatgacactgggggtcacaacactgcagcctcaagtgaatccacctgctctgcatgcagggaacaggacaggcgctctcaacatctcacttcccctaactgagagccagggttaggtcggtcgtgtccaggctgggaactgaattcatacggacttgacttccagataaaatcttaagaaggggcacagacctctcgctctcaaataagcttgcggaacccatgtacctgtgctgcctcgtcacacagcgggctgtggaagaaggacaggatgatgtggaagatgccacgccgggcacacagttcgtagcactgcttgtcacggatcccctgccgcagaacgccaaacacccacttctgctctgttttttgctataacccaggcacacaaaaaactgttgttaataagtgaaagtcctttcatctgacaactgttcaaacaccactattttaagtggtggcaaaagttgtaacacagcagccctgacctccatgtctgattatgaaaaatccctgatctcatctttgattccatttcttcaggtcagaaatagaggatcgagtcaagtttaaatactgaagtcagataagtattctataaaagaatatttaatatgaatatctaaaaacagaatttaatatttaacccagtgattcaccaagaaaatatgagaatgtcgtaaaactcaggactctgaagcagagtttttaaggtttgaggcgccatgtagaagtgagccaacagcacggagacattccgaagtgcaggcctgcgtggccaccgactgcacaatcgtgttggccgtgcagcatacaggatccatggggaaatgtcagaatgacaacggtggctgcatcatcaattcaggggcctgcagaaagccgtgaggactctggaagcatacctcaaagtcggagctgtagaagaactggtagaagcctggcactttgtccatgttcaagtactcatgcgacagcaggaagttgctgaccttcaggtacatgtgctcctctgagaacacaggcagtcagtcagtcatggcaggccccagcaggacgccccctggtctggcagcactaagaggcaggcattctgggtatcagacataaatcccctcccaggaacttttgtgtcctgacccagaggactggctcttgagaatgagaacagaattcaacacgtcagctccataccacacatgggcttgctctcctagctctgaaaccactgctggatgttgagtccttcagggacctcgcaccctccgcctccccagctaccgtcctacagcacaggcttcaaaccagccggtgggaagggtgggacttggtcacacatcccacagatcagggctgacaccacacccacccgctgcacctgcctctagcttctaactgaaaggaaccgtcacagcgggggaggctcagacactactgagtgcctctggaatgcagcaacgcagagggcaacggacaccctagctcctgctacctcctatccttggatcaccaatgagtctaccccatgaccatgctgccctgcacacgctccaccccgacatgagcaccggtgtgggacacagccacacccaggaccaaaaccatcatggtctctgccaattattttcttccccttccaaatctccaaggcaagtaaatccatggaataaaatgaaatgggagcagatgaaaatgagatctgaattctaatagcaacttgactgtgaactaactgtggggccttgacaagctatctacccttgggagcctcagttagtgagtatgggggatacaggtggaaacagcaccctgtggtccctgatggtaccaactttctatgatttttctctcaataaccaaaaaaagtcttagaatgagctaacttctagtcacactatcttagcagtggtacccccattcctgtaacaaaaaggagccttgttctaacagcgtggattacacatgtgcagtactcacataccaaaagctttgtagctaaggacccgtgagcctaagcatgaatcaatgatgaataatggcggtgatggtgacggcagctatcactgatgagtttttactgtgccaggcacttacatgtgtgttagtgtgcgtgatctaggccaggcatggtggctcacacctgtaatcccagcactttgggaggctgaagcaggaggatcgcttgagcccaggagtttgagaccagtctgggcaacataatgaaactctgtctctacaaaaaattagccaggcgtggtggcattcgctgtagtcccagctactcgggaggctgaggtaagagattacctgagcctgggaggtcgaggttgcagtgagccgagatcatgccactgcactccagcctgggtgacagtgccagaccgtgtctccaaaaaacaaaaaaagtgtgtgatcctcatcaccctcacagcaatgctagaggcagtgagtccgatcatcaccccatcttagaggaggaaacgggcatggggaagtccaggaccgtctggctgtgtccacgctttcagcccctgggttccaatccctatgatgtgattggcccacattttaacttcagttttatttgctctcaccacagtttcctataactacaagcgaatatgaatatatactctttccctccattataaatactgttctgcactttgctttgccatctacttttttctggatttcaccccccaggggtccatgacgagcttcctcatagccatcacctatttactgtccagagctgatggggacttcggtggctcctcatcttccacaatcatgagcacggagtggccttgaacacagatgtgtgacccactatacctgtgggactaatccctagaagtagacttgctcagcttcagcttttcaatttcccctcaacctaattatgtcagtggtacctggtttcaaaatctgcagggctgctttggcaatgaagagagccaaggtaaaagtaagtctcatgtcctgagttcgaatcccattccggactacatccaacaggtaaagtagcttgaaaacagaacagaaaaggaaaatgtaagatgagcgtgttcagagctatggtcagtcctctctggtgcagccgaaccagggctcggcagggtgtgcctgcttctcatatcccaggggccactgaagacgaagctcacaggagcagacacactacttgccagcatctccggaacgcttttcgtttttattttaggagtcagtcaggtgcacaacagcagagagaagtctggcaccatgccctgaaaatctaatctgctcttgttcctccagcaccatggggtacaggtttctaaggttcagtgtgtcgtggataatagccaccttaaccactgagtttagaccaaagaaatactcagtagaagtcatataattttgtctacacacaacacaagaaagcctgtaaggagaaacctttctcaacctccacggggggttgtggatcaaaggcgacctccgggatcacctcctaagggaacagacttttgctcttcagcagagatctcccggcaacatgccacctccgtgttccctagtaaatccttctaccaaaccgggtggacagccagctctctgaagtccgccaggcccacccccacagtaggatgtacgctcttcctacttacctgggactgctcttggaaccgtgcgccctccaagtgcgagtagtaggccgccaggacatggtaggctatggctcgcatctgggggtcatagctgctgagggctgtgacagttaggcccagagcatttgaatccaaaaattttcgacaatccaccacaaactctgcaggaaatgaaatacagcatgaaacacacacaatatgattttattattcttgttaacctggagaattaaatttcctcttgtgtcttaccaatagctacatgtgccaagcacaaggaatgcaagtctctctccaactcctcctaacttctgctgaagttagacaaaaaaacctcttcctttatgtggcaataatgaccataccttcagtttctaaaatgctcatacatcccaaccaggataatttcattatttctcataaacacccaatgagtcaggatattggaggtgacactgagacccactgcggagaccccagcatgccagaggcctggggaacacaactgggaatcagcagagaaaatcagtccccagcttccaccttgctcagccctccaccgcgggcgcctgtctataagcatcaccgaggaaagcacacacagcagtgaaagcaggaaaaggcagctgatgccaaccagcccgacaaaggactcactcacacccactctgcaaccctagctcttccttcaaataaacaacacaagtctcacagaaaagtggctcatcaagcttaagcaaaagctacggtccagagagcctgttggctggtatccatttgccatttgtgaggccgagagaagctgacaatcactagaggagaggagaagactcacagagagagggagaaggtcagacacatgaggggatgcgccttaccacaacctagagggctcttcactaacgaaactgaggacaccttcccactccttaataaaaacccaggctattctacaagataaatactgtcaagaagaaccttagaataggaattaattattaatgattaaactgatcatgataattatccacaatgatgttctcgagatagagtgaccagtggcctaattgggaaccaaacacaagccaactgaaatgactactccaaatgagtaatcatggaatataacatcaataagagatagtccattgatgacatttttaaaagttaaagaaagataaagcattttaagcagggacacagaagatacaaaaacccaaaaccaagcttctagagatgaaaactaaaatatctgagctgaaaaatgcattggatggtgaaatggtttggatttgtggccctacccaaatctcatgttgaattacaaacccccatgttggaggtggggactccggtgggaggtgattggatctcggggcagatttccccttgctgttctcatgctagtgagttctcacaagagctggttgtttagaagcgtgtggcactgccccacttcctcctgctctggcatgtaagatgtgcctgctttccctttgccttctaccataattgaaagtttcctgaggcctccccagccatgcttcctacacagactatgaaaccatgagtcaattaaacctcttttcttgatcaattatccagtctcgggttctttataccagtgcaagaatggaccaatagagatgggattatcagtgattagacactagaccaaaaaggattagcgaacttaagacagcaatagaaactatccaagctgaaaacacagagaggaaaaatatgaacagaacatcagtgtcctgtgggtatgtgtaatagggggtccctgaaaaaaatccgaagaaataatggccaaaactttttgaaatctgaccaaaaaaaactataaacctagacagccaagaaactcaaaacataaaacattaagaatatcatgcaagcatcatcacaaataaagcatatatatttatatataaaagaaaatcacacgaaagcacattgtgatcaaattgtttgacaccagtgatttaaaaaaaatcttaagagcagccacatgacatacagaagaatgaagataagaatggcagatttcttgtcagaaataactcaattcagaaaccagaggagcaacttctttaaagtactgtaagaaaaaaaactgtcaaccttgaattttataccccatcaaaatctttcaaaagttaagacttttttcagacacaaaaaagctaaaacaattggtcaccagtatcaaaatctttcaaaagttaagacttttttcagacacaaaaaagctaaaacaattggtcaccagtagacttgaacaataagaattcttaaaggaagtattttaggaagaagaaaaatgataccagatagaaatctagatctacacaaaggaatggtaacaatatggcaaatatcaaatatttacacttcttttagaaataatgacaatttgaagcaaaaacaacactatattgtagggtttatagcatactgaaatgtaatgcatgacaagaatagcagaaaagccagaagggaggaaatggatctatactgttacaaggtccttatactatacatgaagtggtatcatctcacttgaagataaactataatagattgaagatgtgtactataaaccctaaagcaaccagtaaaaatatgcatgcatgcactcatacacatacaaaagttgcaggtaaaagtcaacaagagataaaatagagtcagatcaataatcacattaaatataaatgatgtatgcactccaaaataaaaggcagagatggtcagattagataaaaagcagaacctaggtacatgctgccttcaagaaacccattttcaatatcaagacatagactaaaagtgaaaggatgaaaagagcatagtcagatgactcttgggcatagcagtttaggaacaaaattttctaattctcttatctctacttttttaaagccagagtctcctttgtcgcccaggctggagtgcagtggcacaatcttggctcactgtaacctccaccttacgggtgcaagcgattcttgtgcctcagcctcctgagtagctaggactacaggcatgtgccaccatgcccagctaattttcttatttttagtagagacggggtttcaccatgttggccaggctggtttcaaactcctggcctcaagtgatcagctcgccttggcctcccaaagtgctgggattacaggaatgagtcaccgtgcccagcctaattttcttatttctcacaagtgactgtttttgataagagggaaaaagaaatccaaaagctttaaaagcaccaaactagatacaattatattgttttacaaaagatggaagaaatgtgtttaagagacacctacataagtacataacaaatataggtaaatggaatacatttgggaaagagaaaagtctaaacatttagtttatactcactaaaagcagctaatactcagctggctgggatatttttagtaatcactgacattctaagacaaatggattttccacgtgtccatgaggaaaagtcagtttcctgttttgtgctcatctctgctactctatgaaaatcttggctttgtaacacttatggaaaagagccgccctcagaatgctgaaaacatgataggctatttaaaaatagttataaatgccattctctttgtttcaagaacctcatgaatagcaacgtggccttaacagaccttcagatcaaaatggcttaaccaggacagttatcaaggattaaaattaaaactgccccagaactgggtgtaatggctcacccagcctcccaaggtgctgtaatcccccagcaacttgggaggctgaggtgggaggattacttggggccaggagttcccctggcaacatagagagatacagtctctaccaaaaaaaaaaaattagctaggcatggtggtgcacatttgcagtcctagctactcaggaggctgaggcaggaggacggcttgaacaggagtttgggtatacagtgagccatgatcatgccactgcactccaacctaggtgacagagtgagaccctgactcttaaaaaaaaatgtgccccagtattagtgggcttcagtagcagtgtaactgctgttggagcatcagaaatcttccttacacctctttttacataatatcccccagaggcaccccaataggctagactcatcacagtgagaagagtcagaggagcctgcgtgctctggtcatctagtgatgaggctcagagaattgcaaatggggcttcctgttctggctgccttgtggcatgtgtgaattatgagctgtagatttcagcccagttctgttgaggacaagagtttgctgtggaaaaagcatttgtcactgccattgctaacagccttggctggccctgtttcttggccaaggactcaaagaagggaaggaataaggttaagaaaataggttcccatttccagcaaagggctgaaaacggagcagtgggactgtaattactctcaagactggcagccacatataaaaattaattggatgctcaatttaggattgcagttagtttagcaatatctggacccagatgccaccgcaggaagtaaaaacatacagttgagaacttctgctacactctgcatagctgaatctcacaaatgtaacatgggatagatgcagcttggcagcaaagattacatcatgtgtatcgccatttacatgaagttcaaatacaggatgctggccccttctagggaggaaggggcttgaggagctgcttactgttctatgccctgatctcactggtggtgtcaccactactgacttttctatgtgtcacacttcaactattttagtgccaggaatttgcctcttccaatgaatgagtgtgcttcctttcagcagtcaatgaaatctgtttaaaaaccaggcctccatctttcgtttgggatgacaagatgctcagagcaacatctaagaaatgtactttttggggagtgtttttttttttttttttttttttgggtatatccatttccctctccacctgtatgccttttgaaatgttctactttgatatgaatttttcgtgtaaatttttgactattgcaattccttttcaaattgggataggcaagctctgcaaatttttctacctgtattaaaccaataaaacttaaatagtcgtatttggaaatttaaggtaaggaaactggtacctggtacattttcctaatttgaaagaccatttactaatgacagctcttcaaaaaagtcctcccagaccaagggaaaaaaaaaaaaaaagcacagtactcaagatttcatgaaaattaacatcctgattttgctattaaactttttccaagcctttttctcctgaaagctctatctgttataattcactaaagttaaaaggtccagtagtcttgcatttttttagagtatggaaactttatttccatgtttgatgagtaacagatttagcagcaccactgaggcacaggggaaatcagaagagcttcctggccactgactaggagatctgctgcagttagcctgctgcttaaaatcgccatcagggcaattaagatatccatttgctattaccgtaatctgacatttgtatgaaatgccccctgctctcttgcaaacaaaatccagcttcagcaacagagcacagtgctcaccatggggagctagagccaacacaaaggcctattgatgggaagatctctatgatatcctagcctctttgatctttttaaaagggatacaaagggcactgatagaggattggcaaatctattcagaagtaggagcatttgttgagaaaataaaatttcaagtttaaaaaggaggaaaacaggatgaatagtggaacaatgtctccccagtgcacctaaatctccccagttgtgaagtctgggagtccattcagggatcacgcgaaccagcacagaagcaaaatgtgtgccgccacacccccagcacaccccactggaatctcaagctggacctaggaaaacatgaggaactgcaacagttctccctctagaatgaggaaactgtggccagaggtagggcaggaagtgcattttccctgtatacccttcagcacctgctgaatttcaaactgtgaatgtattacctaatgttaaaaattaatgaacttagacttcccaattctggcaagatggagtagacatgctttttcctattcttcctatcaagtagaactaaaaatactgagcatcatatgtagaacaaatataagatgattctggaaggtagaaagaaagcagaccagtcagagaccttgagacccaaagaacaagggagtgcgttcctgggttgtcttcttgcctcatttgtcctagacttagaactcaagtcagcaacctggaaacatcgacaggctctcacacacacaaaggccggaacaaaagcctgttctctctaacaaaaaagaatggaaaaagggctgcctagcaagacagaaaactgtgagccaagagcggcgatacttcagccaaacacttcactgtgccccactcccagccacaccagcaaaggtggagcctagactcccacccctgccaggctggaaagaggagccccaaatcccctgttggggtggcatgagagaaggccaagtagggaggcaggatgttcctctcctgggcagtgacagtacactcctcctgcccccactggggtgtcagaggaagcctagcagagagtaaggactttcagcatgcccagcagtgactgggcagcccccacttctacctgtccccgccaggaaagacctgcagaggcccagtgagcagctgggacccccatctcaaccaacagtcacaagcgggacagatggacttttcaacacacagaggctgtaacaactgacaacaacaggtgaagcagtatgaatccagacctggacatcacacctcacagaaaagtgagctcaaaacagatcacgggcttaaatttaaagagtaaaactagaaacttttagatagaaacataagaaaaattcctcaggatctaggagtagacagagttcttagatgccaagagcatgatccgtaaaaggaaaaactgaccaaatgggcttcatcaaaattaaaagcttttgctctgtgaaagaacttgttaaaaggattaaaagataagctacggattgttagatatttgcaaaccacaaatccttccaaggactagtatctggaatatataaagaacactcaaaactcaatagttgaaaaaagaaagacaaaaaaaaaaaaaatccccaaactcaagttaaaaaaacaaaagacaaaaaaaaaaaaaaaatccccaaactcaagttaaaaaaacaaaagacaaaaaaaaaaaaaaatccccaaactcaatagttaaaaaaacaaaaaacaaaaaatcccattagaaaatgggcaaaagacatgaacagacatttcaccaaagaggatgtgcagatagcaaataagccacaggatgttcaacatcattagccattagaaaaatgcaaattcaagccacaatgagctatccctgcacactgtcagaatgctcccaaccaagagacctgaccagcctgggaagatcaatctcagtgtttctcaatgtgcgttacatggaagtgtttctttctctccccacaacccattcacccacaaggactcccactctgaggctactagacacaaaacataatttccaaaatgtacttaagccaagaaaaaggcaacctcagcaggctgacccattatcaggactaaaatctctcatttctgttggtatttgaccagtaactaataaaaatgcagaaaatgttcatcattaggaattaggaaaacatcaaagacaattggacatttccagattttaaaattacaatttttttttttaaatcactgtatgttcaaaatactaactgtgactttgctgaaaatcactggaatgaacagatgaggatggctgaagatcctttaagaattatttccaagattcaggtcctcatgtggtaattatggcaataattaccataatcaacctgacctctgagaagtcatgcatagcaagccctgacccaagagaagactgcagttacctggcctggtcagctcactgaagagctgaaggagaaagcaggggtcatagaggccatcaagatccaccctgcttttgtctttgaatatcagctcctgtgtgtcctgaaagagccaaaatcaacaaaaacgtgtgattcaacctcacaaaggtaatacaggttgagtatctcttatctgaaacacctgggatcagaaatgtttcagattttggaatatttgcatacataatgagatatcttggggatgggagccaagtttaaacacacaaatcatttatgtttcatatgcacgtaatatacatagcatgcaggtaactttatacaggaatttaagataattttgtgcatgaaagaaagtctctgtacactgaccctcaggaaagcaaaggcgtctctatctcatgttagtgctcaaaaagcttcaaattttggaacatttcagatttgggattttcagattagagattctcaacctgtatggcataactgtttaccctctactgccagagctcaaattattttgaatatttaagggcataaagcaaagtgcttgtgtaaaaagcagtgcttgtacatgaaatgataggatccttgggatgtgctgcaacataatctccttgggggcaggggaacagagtggtataaacagaacaagcgtggccagtgcagatcattgttgcagctgggcggtgggcttatgagggtctggtctctatacctttatatatgataagattcttacttaataaaaaggtaaataacaagaaaaacgaagctgagggtgcagatggagcccctgaggctggggtgaaggggtgggtagggacagaacagcagcagcccaacctcggggggcagcagcctccggttctgggggaagtgcaggatggtctgcatcatccggtcccggtccagcaggcgaaggatgtccccgacactcggctgctgccacagtgacctgcccaggctccggcacgtcttgtgatgctccacggccgctgggccccacagcagcaccctagagccagaaaagggaaaagagactggtcacagagccccccgggaacagaattaatcatgataacaacaacaggtagcagttgtcaggctgccagttcacaccaggtgctgttctgagcatgcgacgtgttatatcactcaatcccatcacagcttacgaagtgggtggtggtgatggtgaggctgagggtgggtgacagtgtcagtgatgacgacagaagctggtgtctactcagctggccctattctaagcccttcatgtagatcaattcactcaatctgcacaacatctccatcaggtgggtactattattataccccttgtgcaaatgggggaaagaggtgcggagaggattaagcaagttgctcagctgctcacctgctcagatggtatgttgcagggctgggattcagactcaggaagtctggctcctgagtccatgctagaacatagcggcagaattctgatctctcactgctcacatgtggccacgagtgaaccaggtctgcctacacaagcctttcggctaagcccaccatgtgtgtgctatggacaaccttcatacctcaaccgccaccacagctgtcagaggccaccttgccttccttcctcctagaaaatgactccagcctagcacttcccccaactctcctcctccctcccccatccactgccctgctgctgccccgctgctgccaggccgctccccagagcccagctgtgacgaggaatgcttccctgctgtctcccagatggaatggaaatgcttccatctggtactttcaccctccactggcaatccacgtggccttcccattgcctgtttccctgcacacatccaatgaccccgataagccgggctactcaccctttccccaaatgtcctgagtttccactcctgcatgctgtttcctcctcctgctgccccaggcccctctgcccacctcacctcaattaaatccctctgactcgccaaatgccaaccctggcacgaatcggtcttgagcacatagggcctggctcttggtgctcctgtaagagctggtttatatcacggggcgtgagtcagctgccactttaaaaatgtctaaatttctcacagtctgttaccctcagcagatgggaagactgtatctcattcccataggttttcctgagagcaccaagcccagcgcctccaggcaatcaaggaacattatctatagagctaaatacttctaaacaaaattcttctaaatacaggttcgcttctgtgcaagtcgacaacagtcactaatgtcagaaaaggaaagaatcatcctttcaggaatgctcgctgttcaccccagtttctggcaggcagagagcccatgcgccaggcacacccggcagactgcccatcacagaccggcgggagagccgccacgtagcgtccaggatccccagctcagctccccgagctcaggcctgctccctcatctaaggacgagatgtttattttgtttgcggaaatgctctgtgccccttagagccacagtgccagtgagcggcacatccttgattcgctcttccccggcagctgaaactagactcccttcacagccagccctgtcctgtgactccctgggcagcctcgcttggcgttctctgctgtgttagaggtcgttctgcagaaatgggtagctggaacaatgctgcactgtgataaaacccgcctccgacttgctctcccctcttcctcacataagaagggctattctactccagaaaggacataactgacatagcaccagctccgacgtcaaaagagcgaggctgccgcaggagaaaggaaaagagcttctatgcaagccctgggcattcttaagagacagaaaaaaatgttttcatttcctttttctttcttttttttgtggggtggggagggttgggagatagcttctgggctgatacagctctaatctttaaacaaagtactttgacgtggaaattgttttctcctccctgcaagctctcctgaacaatcttccttggcccagtcagcccgcctcctggctgaacacacacacacacgtacatactgagcagatgttccagtgctagtcccaaatggcaaggagaaaagaagactctagggcagcaaagaggatccaaaagtgcattctatcaatggcacatttgatcaagctcctgcttaggtgcggcacttgtaaaggtgaggcagggcccacagggaaaggtgtcacactcagccctgcaggaccaaagcccacctgaccaaaagactgggagcccaggaaagacagacatgtacacccacacccacctacatacacgcatgcacacacagacacaagcatgcatgcacatacagacaaaaaaaaagagattttatgtacagttgagccccctgacacttcccctgaaatccctatggcataagtcaatctacctaaaggcatgagcagaaaagttttcagaaaaatcaaccaaatgagacaccccagtccagctgacagtgcacaacaggggcaattccagacagacaggcacccatcagtcagctgcagtggccctgcccagatgccttatggcataaggccaagcttccccagagcaccctatgcagaagccagtgtgagtcaggggagtgctgcctgcctcactctttccctgagaaccaaaatggaatgagagaaaatctcgagtctggagctcactgtgtggagagcaggctgtgacctcaaggcctagtctacctctagcccaacactcacctgaagttgatgaggctgagcttgttctgctcatacgctcgaagcagaagtaaaatcttctgatctacaagtcaaagcaggatcggtttaggaagatgaacccctgacaccctcctgctgctcccaccacctgccctcataccctccctgctcaaatggcccggtcctcatatcttcaccctgcttgcaccgcctggtctcactgtctcctcctgctcacatccctccagctctcattccctatctctgctcacacccccggccctcactccctccccctgctcacactacccagccctcacaccctcacctaggacgctgagagtggcgccataggccccgagaagcactgcaaagtggctgctctcacagacagaggggcacatctccaccaccgtcagcatcaggtccaccagcgcttctgcaagaaaacaaccctgaaacacatggcatggtggggcagacacactgaataccagaagaggagagagccttccaggcaacattgaaatgctggaaatctcctcctctgaataatactggtgtttggactgccatctaatcccttccccgcttatttttttgttattattattttcttttctttttttctttttttttttgagatgaggtcgtgctatgttgcccaggctgaactccttagctcaagcaatcctccttggcatcccaaagtgctgggatcagaggcatgagccaccgcgcccagccccccacgtgtttttcaattaagacatctccacagtcacctttcttcctaggcctttgacaaggctgaattcagtccctgcgcattccccctcccaaatgttaagccaatacagattttcaatccaggcatgttttccccatgactgtgctaccaaagcctctactctgtctactcttgcctgaattgaatggtggagcccttttagtttttctactacccataccagtgatgtggctaatggctgtcttcgacttattaatagcagtttattacagtctgaccctgtggtgattgctaatacttccgggtgtgaattttatctgtctaaacagagcgtggcgtcaggagggcaggaaccctcggattatcttctctgacatccgacctgtgagcactaaagtgaatccttactgaattagggatggagcctaaacttaggcttttgaagttctttaccactgaactgtcaatgggcaagttccaaccgttttcccttgataaaagtttcaatcttcccaagcagaaatttcatgcaactaatcaatttctctcaggttagacacccacacttttttcccacgcgtgacttcccctcgatcccagattttaacatgagcccatgataacggcactaagatctcaaacacaacttctgtaagccagttaaggccttgaaaacaggtttgtatttgctgtttgaccacaagtcagaggagacatttcttcaccctggatttgacagaaataaaacattctgacactgtcttggcaatgcttccttagctccgagagccggagggagatgagcctcagtgcagccagtgtaaggaaatcaggagataaaatctggatacggaatggaagggctggggtgaggggtcaccttttacttggctgtccgggctctcctctccgtcagacgtcagtagagtcggcagaaacagcgagtgctgcatgagcatcacgtagaccaccgggagctggatgagcttcgtgcgcacggagctttctgggctgtacaggagctgtacggcggtgaggagcatctttaaaaatgtgtggtcctggtaccgaaatctaggcggcgagagtcaaagggaaaagagctttgctaaaaggaaaatttattttacaggaaacaataaagattctttttctcagtattttatttatttatttatttttgagatggagtctcattcattctattgcccaggctggagtacagtggtgcaatctcagctcactgcagcctctgcctcccaagtgcaagtgattctcctgcctcagcctccagagtaactgggattaaaggcatgcaccaccacgcctggctaattttgtatttttagtagagacgtgacttcaccatgttggccaggttgggcttgaattcctgacctcaggtgagctgcccacctcggcctcccaaagtgcagggattacaggcatgagccactgcgcccggccattttctcagtattttattaagaaaatgttcaaacaacaccaagttgagaattttgcagcaaataccctatacccaccatccaggctctaccactgacacggcactgcatagctctatcacagtcttgtctgtccactgacacagggagcacttctcaaaacaagggagggatgcagtgcatttattttcttttttttttcttttttttttttttgagacggagtctcgctctgtcgcctaggctggagtgcagtggcatgatcttggctcactgcaagctccgcctcccgggttcacaccattctcctgcctcagccttcagagtagctgggactataggcgcccaccaccacacctggctaattttttcatatttttagtagagacggggtttcactgtgttagccaggatggtctcgatcttctgacctcgtgatccgcccgcctcagcctcccaaagtgctgggattacaggcgtgagccactgagcccagcccagtgcatttgttttctttatgactcaaacaccaaaagaacttcctgcttagtggaaacgccaggaggcatgagaacagctgcgcctgagaaagaggcaacttagtgcctcccaggtcaccttgcccggcctccctccttcctcactctcctctactcagaacttccatcaaatggttcagaagccttctatgtcctaaatcccttcaaaacccactaaggaaaggaaagcaacacgctctaaagaaagtgtttttcagtcctatacgaataactttaacctaagatggaaagaaatatcataattctgtgatggtaacctatagttgtcattaacctggcacccactctcacttctctctctcctcttgtgtgaaatacttttctctgtttcaagttcatgggatggtcagggaaatgaaaataatgcatgactatctgattgccccaaactgaagagctggaatgtatcaagggtcaggaaggatgttaagggaaaatgaacgctgacacacactctgttgggagtgcaaattcgctggccgggcacagtggcttacgcctgtaatcccagcactttgggaggccgaggcaggtggattacctgaggtcaggagttcgagaccagcctgcccaacatggtgaaaccacgtctctactaaaaatacaaaaaattagccgagcatggtggtgcgtgcctgtggactcagctacttgggaggccgaggcaggagaatcacttgaacctgggagacagatgctgcagtaagccgagatcacaccattgtactccagtctgggcaacatgagcaaaactctgtctcaaaaacaaaaacaaaaaatttgctcaacaactttggagagcagtttgagcatctagaactgaagatgcacccacactaaaagctagtaagtccccaatccaccccaagagacatgatagagactgtaagactataatgggagagaatgagagaatgagacagagaaagagaaaaacagagagggagggagagagagatgtgatgtaaaggggagaatagggagaacagcctagacatttgtcagtagaggactggctaagtaatctggaatatagtcaaaagaccgaatattctacagcagtaaaaatgaatgacttagatctacaagtatcagtacgggtaaattagaaacatctcagtgaacaaaaggatgtataaagaatgatacattaaaaaaaaaagaatgatacattagtgtaaaatgttaaacacgctaaataatactgtttaacaacatactaacactcagtgtatgaaaatacaaaataagatactgacgagacaaagcagaacctcagaagagtgttgacctttggttacagagggatgagaaagaaacaggacaaacacagaaaactgtcagcatgtattaaatgtgggggctactattattctctgcacatttctgtatttctttaaatagttcttttaaaagactgcttctctcatcatcagaagcaccctgtgtcaagaggcaaatcatttaacttctccaacttctatctctaaaaacgaggtgacatcggctccaccacgtggattatgctaataacaagctataaaagaggctttgcatgctgaacgacattcacacctttaccgaagggcaccaagaaaataaaatcaacttacttgagtcccttcttcacgaatttctgccagtcaccaggatcaacttcattaagtgcatgctatgaataaaataagtaagaaaaacacatgaaacatctcagtctacaaaatactaaaaggccccagctgcagagccttcagaaaggcatctgcctccatggcctgactacctcctctgtaaaacccatgatcaaagggttgaaaagaggagcgctggtgtccccttctgctctgacacttgtgattcaacccagcagctgctctgttctggactctctgtgcaatgattatttttttttaatagaataggcatacaaatttattaatgtgcgtgggaaaaatcactgagcagttactcttgtttgcacaattcttgacaagcatgtgatagctcaaacttacaggggcagagagcagaaccaagattaatcttaaaacaaaaactaaaatgcagaatatgaaattacacttagagcacttagagccatgtaatatgaaattacacttagggccattcagtaaatatgaaacacagtcatccaaacaatccacaagagcatgaaggttttggatttttttttttaacttaaaaaaaattgtttggttatttctgctagtagctctgacattttatcagcataattgtgtttatcaaatagtcaaaggaaatttcctgagtagtcctgttatttttttcctttgtctatcatttcaaatagcactaatagatttgtaattagccttttattaaatagccaatgaaaactactagtgtgacacctttacccagcctccaggacacagggttggatgacatgaagaggtctgtggaactggatgatcaatgctggctccagagagaccagctacaggccgtgtgtgtgcaggctgctgcctcccaccaggctggctgtgcagtggaggccacagttccagaaatcacaaggaaatccaaggagatcctggacccatcagctgaggtatatctcacactcgtgacttttttttttcttttttaaaagagattgggtcttgctaggttgccaaggctggagtgcaatggtgcaatggctattcataggcgcaatcccactactgatcagcacaggagttttgacctgttctgtttccaacctaggccagttcacctctccttaggtaacctggtggtctcctgctccaggaagcactagtgccaacttgtgaaccaggaaagccggaaccctggtcaggatctcctctcgctccagagcagctggaattacaggcgcgtgccaccatgcctggctcatcacatttttatatacatgttctctttcccccagcatttcctgcaactggacataaatggccaagtgtgcaaaaatggaccatgcaaagatgtttatcacagcattctttatcataataaaaaactggaaaaccacccacagctccagtatcatacaactgcgtgatacatgatggtacatttacccatctaccactgaccactaacaaagtcacagcaggtccgcagtcatcgggtggggaaaaaaaatctctaaatatggtattatgctaaaaacaaacaaaagaccaggctacacacagcatgcataatatcctattaatatataaaattatacataattttatcacacacacacagatatataacaaggtttctacagggaaattcaccaaacttataatgagatagactctgggtaatgggagttttttttttgttttcttctctattttttgcagtgtgaatacttgcaatgagtatgtcttttagccctgtgatcacaaaaaccagtaattccaaattttatgagtggtagaggagagtggacatcatacagtagaattctactcagcaacaaaaagtaagaaactacttattcccaccacatggatgaatctggaaagcatcactgaacttaaagaagtgaaacgcatcacagttgacacactatatgattatactgcacggttccaagtatacaaaggtctcaaacaggcaaaacaacctcagggttacagaaatcaaaagagtggttgctttggagggaaggggattttgagaagatgcacaagaaactttctgggatgatgaaaatcttcttggataggaatgtggggtacacagatacatgaagtacacatatttctgtatatttcaaaatatgtaaacttacctcaattaaaagaaaaggcaggtaaggagggaggcaaccctctaaaagagcccagtctgtcattccatcatcaagccacccactggatggagaggaataatggccaaatatctctaaattttgtgaaaactataaacctacagaccacgaagctcactgaacccaaagtacaagaaacttgaataaaactaccctgaagtgtatcattatcaaactgctttaaaccatgtaaaaaaaaaaaatcctaaaatcagtcagagaaagaagacacaacacacagagaaacaaaggcaagaaaggcaagtttcttactggaagcaaagcaggccagaagacagaaaagcaacaagtttgaaatacttaaaggaggaaaaaactatcaacatagaattttatacccagtgaaacttcccaacttgttttataaggccagcattacttaatccttaagaccaaagacattgcaggaaaataaaattacaaatatccctcatggacacagatgcaaaaattcttaatgaaatattaacaaatcaaacaatatataaaaataacacatcaaaatcaagcaggcttatcccaggaatgcaaggttggtttaacattcaaaaatttgttaatataattcatcttattggtagactaatcaaaaaacaagacattatataacatcttgaaatggaaaaaagcacttgacaaaaagcatttgacaaaatccaaacatccattcctgataaaagatggttcatcaattctggggttatccagtatctgccactctgccccagacacagcccctctcatttcctacagggccatattcatgccacctggcttgaaatgcatctatagcttggtttgtctagcatactctttcccacagaaatttaatctggatctctaagaaaagacacttaccaacaacgcatttaatctaagcagcatttccttctcctgattctgagtattatcatcatcttgctgtccaccactgaaagacacgatcagccacttcacacaggactccaaaagggtccttctccaggcacacagctcttctgctgacccttccagagctgctgaaatggagtcggccacgatccacctgcagcaggagatgagagtcagagacagagagcaggtttaaatccttctgactttacgtataatccagcatcacaaagagccatatgggatagatgctgagtcctgctccccacactacccactcacaggaatcacaggcttccctggactcttactcaaatgccaaagatataccaaaatttttacaagcaagggaaatactattagtacaccaggaaaaggacacgtatgtccagactttttctaaatcagggtttctcaacctcagtgctactgacattatgggacagataattctaccctttagaagccagaagcaacaccctctcatcctagttgtgacaataaaagatgtcagacattgtcaattgtcccctgggagaaaatcacccccagctgagatccatggctctcagggaacccgacccagccatctacttgtggagatgtacaagctccaggcaggatggctggaagtagagttctcataggaactgcctgatcacagatggggcacaacagtaatgcagcagtttttcaatgacttactctatgaattaaaaaaaaaatgacaccgagagtggaacatcctgcaaccaacctgagccttcatacctcttgtgactgcttggggtgtgaagcaagctgggcaggcggtccatgagtacactgagatccttggctcgtgcaaacgggaccagctgtgccaggatctcctggtacagcccagatgctgggggactgtcagtgctaagaagcctgctctgtagctgcctccacagggtcttcctcaagacaggaatgacagcggaagacactagggcagagatacaaaggagaagtcatcacacccaatggtgggctgcagccagcttggaccagctcctaggaactggttgctatattttaggtatcctgtgaccctggtgatgccacaccggtggcctgaaattggtcacggcaggagtactgacaccatggaaactggcacacctgtctccttcaagggtcctcccctatctcatcagtcaacactcttgatggatactcttcaacacagggggccctggctatagacgctatttctaagctcatgatgagaccatgagtgccaaggttctcaattcatatgggattcattcttcaaagccatggaatagggagggtagctgctatggtttggatgtctgtcccctccaaatctcatgttgaaatgtgatctccagtgttggaggtggggtctaatgggaggtgtttgggtcatggaggcaggtccctcatgaatggcttggtgcagtccttgtggtagagtgaatgagttctggctcaccctattagttcccagagtgccaggtgttaaaaagagcctgccacctcctgtgcctcttgcttcccctctggccgtgtgatctctgcagagctggctccgctttttcttccaccatgagtggaagcagcctgaggccctcacaagaagcagacgctagctccttgcttcctgtacagcctgcagacgcatgggccaaataagcctcttttctttataaatcactcatcctcaggtcttccgttataccaatgttaaatggactatgactagaagacttgcagggcactgtcttactttttaaaacctctgtcatcaatgataggaagttatgcaaaacagaggcaaagtggtgagtaaaaatcacccatgcattcaacaaaagggaattacattaaatttggggtaattgaaaagtgcctcagctctgaaacccagtgagtggagacagaagagagagctgaacccaggctgcctcgactcaacatcaactcatcaacatctccccagagggcagggaaccctgggacatgggatggattggcacccaagaactccttcaacgtaacaggacagccctaaataacccccgctactgtacccaactcccgccagcttcatgtgggggaactcagacctgatggggcacaatgggctgtgcctcaagccacaaagtagggagactgaagggagacagggtactggggagaattactccacctttctccatcttcagagttgtgtcagacactggaaactaacccacatcccagaacctgaatttctagggtttaaaaatggccatgcagttcaccttcttagcccgtgcaacttaagaccccagctgcccaaagctagcctttcccttacctcctgctgggcgtgtgaagtggctccgtgtcctgcactggaggtacacatggatgaggggaaggaagtcgtccaggtccccctggaggccgagccctgggccagcctgcaggcaccactgctcgaaccacagcaagtgggtgcagctctcctggaggagcagggcagcgatgctgagggccgcctgtgtgcgccgggccaggcagtagtcaagcagatcagccccgactgcgggggccagcacagggtctctctgcagagtgtggaggagcactgtgtccagctcgtccactgctagcgtgggcagcagagcccccaggcctctcacatactcggaggaccacaggagctcaccactctgcagctgatcctgggggctgcaggtcagcagctgcaccagggtctttccaagagcattcaggtgtctttccttcccgggggatttcgtgggttgctgggtcaccaggtgtgtctcaggcaggctcagcaaggccagggtgacctcacggagctgggcaccctccatgtatggatgcagctcctgcagggcctccagctgcggcggggtctttggtggtgatgtggccgggcccgccctcctgttctgaagttccttcagcacactctgggtgatggcctctgagtacctggccagaaggcccagctgcccaatgttctggaggatcggggcacttgctgccagcagctgaaggacccctgcactaaagtgggtggccaggagcttcacgaggacagggctgagcgtgtgcggcgggagggcctgctgctccagggccaggaaccagccctccagggtggggtgcctgaggatggccacaagcacctcctccagcgtctgaaaggcagtgacgaggcacagacgtcacatagagcacagggctaagacaggggcggcagctgccacgcaagtattcactgttgttagcgagacagagagcagaaggcccctttcctaatccattccatcctcaagcctacatttccatgcccccctcggggtgcccaaggcatcgcagccaagcccagccagagctgtcatccagttataccacaatcgcctgagacactccacctgccccggaaggactggactgtgacctggctggtgccccacccacatttgcgagcacgtgtctgaagaacccagcctgggtgaatttccagcatgggaaaagtgctctctatggtcactcagtgtggggggcgggccgtgcagaaacaccaccatgtgagtaagatcaatcagctgctggcttctcctcagcggccttgccctcctagataaatctggttgagggacaggggtgtctacttacagctggggtgatgtcagtttagatgagaccatgtgtccggggaaagtgggttgggattaaaccaccgtgtgtctacgatcctgaattgaaagtaatcctgtctccactgtcaggaggagactgggccttgagtgaccccacaaaacccccaaactagttctgacctggccaactgagtaaacattgagcagaatgcagttgagctcccttgctggattagagaataatttcattcagtcattcctcacagccctgctgaaccgattcctcgccaacgacactccaccagttcccagagacagaaagaaattttctttccttatttattcttagggaaggaaagaggagcctatcacagtctccactcaagctttaccagttaaaaacagcaaagcacgattacatattgagaatgctttgcctcacgctgactggctaataataggtggtcccacccaagaaaatacctcccagaaaggcaactcagagctcaaaggaaaaaagtgtatatttcaattagattgtgcaacaaggaacgtgtctgcctcctgaacccggtaaaacaggttacatggcaaactgtgaaatagtcatcttggccccaattaaacagcctgcttcccaagactcccaacaggacagaaaggctgctgcttctcagagcagtctatttcctgtgtgtatttcctgtgaaaagcagcacctgctgcccacctttcactcaacacaagctgcagctattcacactgtttctcagcaggctcacctcacacagcgtgagagaaagctgtctgcagggagggtgactgtacacagaaaagcaacaggaaagagaagcccaaattaaaccgcatgctgggcgggtgccaggaagtttttatgatctctgctgtagtttctgcatttcccaattttcccacaatggacctatgtttgtttttaatcagaagtgaagagaaagccactgcccatgactctgagaataggctaccaggcaacctgtggcggtacctgatcattggccaactccagcgaggccacggactccatgtccaggaagaggtcggcttcggcccgggcggcctcgcatctctgctggttctgggcatccagctgctcacagtggacaaccaggcgcctgaggagatccaggaagagctgcaggaggggcgggcccacacttctgcccagctgtgaggacaagagcacgagcctcagcagggaagagacgggttcacagctaccaggcagtgacttccagggcccgtgttttcagagcaggagactcgggaggcaggctgagatggcaactcctcacagagtgtgtgagacacccatcaatgcaatgccatttctcaaataagagatgtgtcttcctaagccttggtgaaacacaaaggttgttttgactaaactgaaagggacaggcccacctcaaaacttaaaaatcccttgaaccacatcaggaacagaaattcatcagccagttactaaattaatacacttaagagggagggctgggccaggctcagtggctcacgcctgtaatcccagcacttcgggaggctgtggcgggtatatcacctgaggtcaggagttcaagaccagcctggccaacatggcgaaaccccatctctactaaaaatacaaaaattagccaggcgtgttggtgtgcacttgttatcccagctactagggaggctgacggttgcagtgagctgagggttgctgttgagggttcaacagcttgaacccgggaggcagaggttgcagtgagccaagatcctgccattgcactccatcctgggcaacaagagcgaaactctgtctcagaaaaaaaaaaaaaagagggagggagggctgggtgcggtggctcatgcctgcaatcccagcactgtgggaggctgaggcaggcagatcactgtgagcccaggagtttgagaccagcctgaccaacatggtgagaacccatctcttcaaaaaacacaaaaattagctgggaatggtggtgcatgcctgtagtcccagctacttgaaaggctgagaggttggagggtggcttgagtccactgaggtcaaggctgtagtgagctatgatgcgccactgcactccagacttggtgacaaaaaaaacaaaggcccggcagggctgccaacccattctactgtaggaagggctctgtcttgaccaggctgccctgaaaacaaagtcaggctgacctggctcccatgggcagggctgagggacatgaagagtttgcagctgaggtctggacagaacagcacttaaactgcctctgcagtgagttccagggagcaagagtgtgctgggctgtgggcccgactcagagaaggcttagctctctggtggcagagctctgaagcctgtggaggatgggggcaacgctgacctggccgaagttctccacagtgctccgcaggtagagcaacacctgcttggccgcgagcaggacctgctgcatggacaggtgtggcatggtggcctgcagctgcacctggatgtgctcgtcccgaagcgcttggctctcgtaggctgcctgcagcagggctgtgaaggacgaggccaagggaagggcagggggcgaggggctgccctgtgcctgcagcagctgagggagacagcaaaaggccggggaagagaaagacacatcaccacagatgaaaacggtcataggcacaggtaacacacaacaaacggacatttcacaaagaagcacatgctgagataagactaacgaatacgggaccgtgtggcattttacttcagtagagtaagttctcgtaccatgtcatgcgtactttcctagagcgtttccactgaccacatgtgaaggcccaaattcatgctgcatctacaccccttggagaacaaggcagaagcctgtcccacaggcaggagccacgtgtgacagaggcaggatgtgaatcacaagaatcactagaaagggggaaatcagcccacagagaagcccgctctgcgagtggcctgccttcggaagaccttccccaggagctgcgggtcgaatatcttgttagaaggacagaagatgggcagaacacagagaaatttctggagcccttctgcctcaaactgaagttattcatttcttctaacattactaccaagctgccttctttatttactccacgtggcttatgttgctataattccatttgacttccttaggctaataaaacccaaggctgtaacatgccctgaaacttggtggttgtcagtgttccccaggcctgcagcagcatgtgtgaaatgcaaattctcaggctccacccagacctgccgggccagacactgtggctggaacccggcagtccagtttgaaaaggccctctggggaattccgacacaccctggagggtgagaaccactgctaagtcttattccacagaaggtggacacccactccaagcaaccacgaggggcaggacagaacctctaatactgccacataagttgctgtctggctatcactgtggcctacgtgtgggggaaggtggcaacattatgggtcagggctctggagccagactgcctgggccaaatcctgactccgccactgactggtgttggaaccgctctgggcctcggtttccccatatgcataaaggatggtgagagtcccggcctacttctcagagttacagtaaggattaaacggccaaaaatacacatagtacacttagtacaggacccggtatgcctccaaaaaacacacagaaaacatgcaatcgctgttggctattgctaccaatatcacaagataaggagggtctaaactgactgctttttcgaatgcagctaaaatgaaatgaatgcacaaaaatgcataccacaaatttcgtgccccacacagcattgtaaataccctgcacattggagccagaatcccattaagagaatgtagtccccagcaaaagaaaatatactttttcctttccttccccaactttaacagaagagaccctgctggaggccttgaggggccatgtgtgacagctgagcacagtttgtctagggccatgctaaggtctgcagaggagagccaggagacaagcacgcacagataacaaggtaaggaaaaaaaggaagaggcaacgctcctgccccaggctggaagaggaattaacctattatcattatcagggagccaatggggaatttaatttggctgcatcactgagtcctgtgtgttcagttatgttagctgagcaccagggatactacttagcttcctctcttatgcaggggactttagggtaagaaatttcaccctgcaggctgtctggctacccaactgcacagctgtggcccagccagctgggaccctgggaagaaccctgcacagcagcagtgaccacagctgtggctgcagctcacccaggcctctcgggcttgctccgggatccagaggctgtagtatctgttaaaccgtgagagctgctggcagcaaggcaccaggcatggaggctcaagcttatcatatgcctggagcaggagacacagagccagggggtccctctgggtgtggaggaggtcagtcagcactgccgtcagatatgtcacaacgttttccgctgcaaaggaacgagatgcatatgggaagaggctggctgggcccacccttctgtgacctaccaacaccaccttcttccacatacaggcaagaccctgaaaaattcatgcaactccatgaggggacacataaccacagggaaggaattgctactactggagactgtactaggctctgttttattaaacatatacagcaaagtcagacatccactcccgaggcccaggagtgaagacccaggcatgtaaaaggccaggcaaaagccacctgggaccaggacttgctaggtgctcaccaatccgtttactgtgcctcggcacacaagcctctcttgcgtgtaggctgggaccacatgcctggttagtcacttccaggccataacaccccttgcttgactgtccaccctttccagttccctttccatggtgatcttggaagccataaattgagatggcatagctacaaaacgggagcagcctgaatccctgaccaacctcctaaaggacagccaaccagaagagccacctggcctgtattggaccacagcatggtctagaaacagacccttatttattaaactactgacaagtcagggcttatttgttactgcagcaaagcctgagttctcccaaccaatcatgctactataatctgtgagcacttccttgggtctaagttgcctggaaaatccaacaagtatgaaggattcatcctctacatcaacgtatcaagaataaatgttgacgaaaaaacatcaacgttacagaggctgtctgggcagccaggcaaacacattatttcagactcacgctcaaatgaccaatttcccaaaagcctagccagccccaagatccctcccactgtgctcctagctctgctggctgggtagctatcactctgggggttctgacctcctattgccctggattctcagcaattgatcccagagcccctggaatcccacctcccaccctgcacagactagccggccaggtgcagccaagacatcctgactatacataggtacctgcttcattgcctgtcccaaggagcaacttattcctggcttccagggccgcagggactaccgcactgaatgggaacgtgagcaggatcatgtcttcactcaacgtgaaccctatttcctcatccaagccttcactgccctccaccaggacatccaccatgtcgagaacatctgagacagaaagaggagaatccagctgatgtgagagccactgaagggtttcactgcaaatacccacagggaggcagaagcagaatacgtgcaaaaagaaaaaagccaaattcctcttggggggagcatttaacatagtttgaccctaaacagacaaaaacattgcctatgaaatcttttgtatctttgtctgataaaatgcaggatattcagctgaggtggtaataggttgaagtttcctcaagtgacacaagaagcccaggaactttaacccagatattcaggcaaacaagccaaaatctgagaggcaaaatagtgtgagggttaaagcacaggccagagccagagtacctgcgttctaatcctgactttgctatgtagtagctgtatgagcttgagcaagttattatactaaacctctctgtgccccagccgctttatctctatataaaatgagtagaataataatactcttttctcttggggttgcttatgagatttacatgagttagaacttaaaaagagcttaaaaccctacctggcacccagtaaatactatgcaaataaaacaacaagtgtttcccattacatgaacacataaggagattatttccagaacaggctggtctttgctgcaaagggactgtgtgcacttggcctagggcattagtgcagttcttgttctcaatctcttaacacgtcactgtggcttggtcttcagacctctgagcagcgcagaacagaatggaacataccgtcaatgtgggagatgggaatgctcatgtcatcggcttcttgcttcgtcatagtggcctgcagcatgcttgcttcttggacaaagtcagatgctttgtctgtgtatgaatagggattcgccaccaatgtcaataaaatctgggcattaaagagccaaatagaaagcattcagatggtcacaggtgaaatgaagaagccaaaaaatgtcactggtcaaaatcaaggcaagtgataatatgttcaatccttaattagaatagttttactatgaaattgggcctaaactttttattgtggagttaaaaaaaaatctccttttactatagcactgcttttaataccacttttggtttacctattcccctatgcaaaaacaaattcccaaaaggaaatgaaacagcatgctgtaatatatacgtattttacagattctaaaactatgtagattctgaagtctcagcaagaattaggaagtaagccaggacgagaagccttttggtgctggtgcatcaaaaatgcctcgatgacgctaagaagttaatataattatctctgagcatgttcctttatgtgggaaatatgtgcttacgcgttccagaaactgaatcacagtctctttgtcctcttccatggtgttctctaaatgctccagccagagctccagctccttccaggtgtgctcaaacacccccgtgtcccgcagaatctgccaggaagtaggcaccggtgaaaaagtcagaacagaacgcgctttctttcttttctttgagacagggcctcactctgtcacccaggctggagtgcagtggcatgatctcggctcactgcaacctccgcctcccgggttcaagcaatttttctgccttggcctcctgagtagctgggactacaggagtgtgccaacacgtccagctaatttttctaattttttagcagagacaaagttttgccaagttggccaggctggtatcaaactcctagcttcaagtgatctgcctaccttggcctcccaaagtgttgggattataggcatgagccaccacacccagcctacaggacccactttctgtcggaggtcaagcagtttcattgtgctccagcaccacacgcccaaggagcacgcagggggtgaaagtttcatcccatttttctctgaaagttagtctttcaacataacatccccaattgttgagggaaacaagcaaatcattctatgctctctcaaagacaatataatctggccaggcataggggctcatgcctgtaatctcagcacttcaggagactgaggtgtgagaattgcttgagctcaggagcttgagatcagcggaggcaacatagttgagactctgcctctacagcaaatagtaattaaaaaagtagccgggttagtggtggtgcgcacacatgtggccctagctactcaggaggcttagttgggaggatcacttgagcccagaaggtcaagatggcagtgaaccgtgattgtagcagtgcacagcagcgtggatgacagagcgagagcctgtctcaaacaaacaaaaaagacaatatgatcccttctctcaaggctactcatcgtttatcctcatttcctaaataaaaagaagggaaaaaatttggctgctacttaggagccaaagacctctggattttcacaaagacccaggtaaatgtgtaaaacttgacccctcacagctactcaacccttagcctgtatgaaattctccaaggtcacgagccagtcacatcatatcacttcaaatgcagacctcaagactcactattccaacagaagagaaactggtatgaggcaggacttgaatgtgcagaagtgacgaaatgatttccctaaatggtctgaaagcagaaactcagagtctaagaggcctcacggcacagagccctgcaacagcatgcaccaaaggaaagcctgactgtgccaatttcacctatttgcagtcagtgatcacgaaatctggctggggtcaggttcacaactgcactacctggaaggaaatggcaacctatggaggtcaagacttagactgccacattctttaagcagctcaagagagaaggctgtaagtgtagcaaggttatcagcatttcaaataaaagtgaaaggtcaaacctctgtaccctaaacatagtgcatcccccaagctgtttgttgcagagcagaaatgaggactagatgtcctactgctatcataagacctgacatagctctggaaacatgagtatcaaggacaaaacaagataaggaaataaattcctattctcttccactggctttgatgacccatgtgctgtgggtgatggattctggcaaaaaggctgaaagccctggataacgccagagcctgagaaggaggaaagaggcactgcctaataaacaccaagaagccaaaatttagtattgagcctacaacaagctagaaatgacctacctaaaaaaaaaaaaaaaaaacatttttccaatgcaccaggctgcctcccaggaatgtagctaagtgtaagacacaataaattaaactgccataaaaccttctattttaaaactaaaaacaattccaatacctcctgaattcaataactgttaactaaacacttaccataaggaagatctatacaaaatgcttttcagagttagaaactggtagaaaatgctcaccttcatgatcagaagtttggtcaatgacttcagttgtaaatggctactggtcacaaacattttcattagtaagtaaaatactgatcgttcacctccaataatttctgcatctgggccttcctagagtttaaacaatattacgtatttttagtatatataattacatatataattttaatatatagttatatattagaaacataccatggggccaggcgtggtggcttacacctgtaatctcagcactttgggaggccaaagtgggcagatcacctgaggtcacgcgttggagacgagcctggccaacatggcgaaaccctgtctctactaaaaaatacaaaaattagccagtcatagtggtgcatgcctatagtcccagctacttgggaggctgaggcaggagaatcacttgaacccaggaggcagatgttgcagtgagtccagatgacgccactgcactccagcctgggcaacagagtgagacttcatctccaaaaacaaaaaacaaaacataacgtagcaggagccatcacttgctgaacacacagtatgctgccaggtccttacctcatctcattttaaccacaatttggcaggaagagtagcaagagtaagcacaggtagccctgttcctgtgctggagccgtcccaggggcccagcttacactgactcactgaatcctcccaacacccctgtgaggtgggtacagctgctaccctattttacatatatggaaactgaggcactgggaaggcacctggctgtttactgggaaccaaggcagatgctgtgctgtctggtggatggtgagcaggagggaccccaggctgtctgagtccatcaaatgatgtccttgttactttcatcacgatgccagtgctgatagaacggattgcttatgcataatttatcctcctcaaaaggcttttgggctttgaacaagtcttcaacaagtacatggagctccagatccccaattcaaactctactgagcctgtgtgtctcactacagcccttggcaatgaggacaaccctgaaaatggtgaggtgctggttagcttaggcagagccagcagatataagcataaggtggggcgcaggatataaattcacaccagctctttcaaattatgaggcctctgttcactttccaactaaattatcaagatcccatgagcctagttgagctggagtgaaaaccaatcagcaatgcccgagcctgtcacctccccaggactggtggcaatgaactcacatctcagtggaatggtggcaagcagagctctaggcagcaccgcctgggtcccatcctggacccaccactcatggacaggaccctgcagaaggttctgacacactgtgcccagctgccttgtctttaagtaacgtgaaacgagcagccacatgaagcacccgtaacctgcccagcatgcgagtaagttctcagtaagaatgatcctcagctacgatgcagggaagcctcagaacggggactcgagggagagacacatagtcccagaggcacagcattcttaagtcttcctggaaatgtcgcgtgtagaaatgccaacatacatttccatactactggttccatataagatctaagtcattaaaaagtacatcagctcagattataagaaacacttggacaatgattaattttgcttgataatgttccctcctcctctttgcatagaaatgatgcagcatcctgggcttaagcccagcataaatatatgtggcatcctgagcttccctttatgatttaacattatgttctccaaaaagttctggtagatattttattaaagacctagaaaaaaatgctggcaatgtctactgattcttccaccagcctcaaccctctcctgacttggttatctattctcatctcgtctttaattcttccaggatgaggacaaaagaaaaggaatgtattttattttgtttattatttaaaaatgagaaaaatgtaaaatgtaaaacagttgagataaacaagaaactccctggacccagcaatgtatctgcagcaaggacatgttaagcaccatattttacaaaagcaagcaggttcccaggcctcctggttcatgaatcaggacctctgctgtgggtctctctaaaatgagaactgttaacctcttccgtcttgccccgtcaggttctgagccaattagcaattcatcaggccaagaagccacccggcccagcaggtaagcttagggcagaagactgggagttctgcttcctacctgtgcctttaaccacagaaacttgctggccggcagctccagggccaccttcagcatgtggtgctgcagaatgggaggcacctcctctcgaaggccctgctcagagatgacacctatgggtgaaaaagaggcaggctgaaaaaagtcacatggacgtgggtgcccaacaattgctgccctggccagaaggacaaggaactcaccatggagaaagaaaaagggtggatgcagggttctgtttctctgtcctgtgctcaccctcacatggcacatctcgcctgatgtacccccacgccctggtctgtccaaatcttccaacaaaaagcccaaatcccacttgcctgaagaagccctcccatgccacacagcccacactgaccccaaacagctggaatcaggcacccaccaagtgccctccaggggtaggctctcgctaacattctccctgactccccagacagcaagcattttgtggacagagactgcagccacctgcacctgagattgggttctcatcctctagccggctctctgggcttctcctttgctaccaaatactaaatggccacattctagtaaatttcatatttccacagcaaagagaacttttcaccttcaaatgattaaaaagtgaattgcagcttttgaaaaggagtatttcaatagctcatataaattccaagaatgatatttttgcaagtcttctcccataggcccaattataaagtggatcagacaaactttaccatccaggaaacatgaccagacaagcattgttacttttacaagtttgaacctgactcagtggggtaaaagatgaagtaactatgtcaaaagtgtctctgcataaacaggatgtcccttctgcaggcccctcatttctgctacaccctctgcaaccctgctcccttgaaaagtgactttagagttaacgtcacatgatcggatttgtgggccattcatgtaggttgctcagcactcagaagctggctggcttcttccattgttctcactgctaccaggtgttcatctgatatttacttaaggaagaccagctatttaaaaaatactgatgcaagtacaatttctcaggctgacggatgagcacgcagccaaccgtccaccagccttcctgattcttggctgcagggctctgctctggtttattggcagcaacagtggcggcttgtctgcaagaccttgaaacccacctttcaggagcttgctgaagtcaaagttgtactgcatgaccacgtgggggaccaccttctggtagaggcatatgacctggagcaaaacagctttcaaaagaatggtttctgcatcatctgcacaaaaaaaagaaaaagaaagaaaaagagaaaaaagaaagaaagaaagaaagaaagaaagaaagaaagaaagaaagaaaatagcttgaattagaaaacatactggttctttgtccttgagcagctgaaccaagtgtggcaccacactgcagccaactgcatgctgtacaccgaggctgcagacagactgctcagtacctagatctaatgagtcaatgtggtaaaacgttaaaactgttcagggggtctgggttaaaacctcatttcactgctgtgaccttagacaggttctggtcactctgtctccctgtgctttcgtgtcttcatctgagcaacagggacatacagcagggcctacccttgcagggctgccgaaaggatgaaatacgatacagacataagacacaaacctcaatgcctgaccaacaacaaggctctgagctctatctgcaaaccaagagacagcacccccatactgtcatccctggaaaggccagagcacatggcacccaacactcaagtcttcagagagacacagtgctcgcataaagatgggcacgtttctaacagatactaaaattcaatctatgattcctttccaattcttctccctaagcaaaaaaggatatagacacattcacagccagaggtgccttgaaacaaaaactgctccaggactctctggataggagctatcctaggctgccagtgtcagctctgtcccatgcaaaaggcagagggtccccctcacccctgagaccttaccgcactggtgagcatcgcaggcagccgggggcccatcgctccttttctgccctttcttgtcatcctgtttggtctcttgctttttaagtgactgccagacccacacgacagtgttcaggtctggcaaaatctaaatgggaaaaagaagcagaacattagttgtagtcaaccacaaagggagacaaatgaactgaacacattaacaagatgcaaaaaacagggaggggggtgcgagtctagaggagtgcgtgtaagaaggagagggaagagtggtgagaaaacaggcccaaatccacataagttctgctctgcagtataatttttttttttttgagatggagtctcactctgtcgcccaggctggagtgcagtggggtgacctcagctcactgcaacctccgcctcccaggttcaagtgattctcgtgcgtcagccacctgagtagctggaactacaggcacccaccatcacatccagctaattttttgtatttttagtagaagcagggtttcaccatgttggccaggctggtccttgaactcctgacctcaggtgatccacccatctcagcctcccaaagtgctgggattacaggtgtgagccaccgcgcccaaccatgttctgcagtataatttctagaactatacacagtaaggatttggtgaacaggcaagtgctgatcattaaaacgaaccccttaaacctcattcacctaagcaaaagacacagggaacaaagaaagactttctcaggagcagctcagggaaagctgccctgtgtaactggggctctcagagcagccggccagtttacagaagcctggtcttcagccataggaagcaagaggggcttcctgagccactgcatcccttctcactgggccacagtgtggtctatgtgtgtgcctgcagccatgggtgaggggtaaggacacaatctacccctcgacaacatcaccacggctcctgattgaacatgaggtccccaccagagacagaacccctgtgagagaacacatgtatcgtctaaattcttactctgcacaaggactttgggatcatgctctgtgacatcactgcctacaatcacaagtggcaggtcttctcagctgaccctcagcacccacgctaccacactgcccaccggcctgtccaaccctgcggctccaaggacacatcacttggcttccaccctagggctgcagaatggccttttccacctggtgaggtctggaaggaaagcccaaacccagatcagagcctaccttgctcagggcttctctgaagagctgcacgaattcttccatcatcacagctgtgtacacgcctgattcctgccacacctctttattcaggcagtggtcaacagtttttaatgccctcttcaaaatgacagaaataagggataaggctgtgtgcctcactgaggtgctgtccaactgggaagaaaaagagttaaatgcacacatgtctctaggatacacagatttgctaagctatgggcttggctggcatttgcccctcctcaggtcactcacagggaaagctgcatgaaactgctggtctctacgctctgagaagaggcgacctgggtacctcgccctcctgacatcctctgggtctgacttcagcaattgccaggaaatgaccactaatggtggcatccagcagtagtttcatttttatcatctgctctttggtaagccttgagacaaccactcagctaccatgaaagttctccattaacaacagatctcaccagaacccactctgccactattttttttttgagtcagggtctcactctgtcgcccaggctggagtgcaatggtgcgatcatagctcaccgcagcctcaagctcctgggctcaggcaatcctcccgcctcatcctcccaagtagccaggactataggcacctactgcttctggctttctttttttttttaagagatgagacttagtatgttgcccaggccggcctcaaccttctggcctcaagccaatcctcctgcctcagcctcccaaagcactgggattatgagtgtgaaccactgtgcctagcctttttttttttccttttgtagaggcagggtcttgctatgttgcccaggattctaccactattaaaagcattagcatcaggtggaggaatggccaaaaaaaaatgcatcaggtactttagtatgaaaatccacctccaagctcaatgagcaagcaacccacatcacaggcctgtgacatccagagctcttgacttccagtcagaatgacacctgggagagtcactcactgcagagactgagtagggttcaagaacctgtgctactaccaacagtaggaaaacagtccctgcccctgctagtcacagtgtgttctggggccaggaggatcatatgatggcatctcccggagctcaggagaaatgtagaagcccaggccccggcccacacaactcaagcagaatctgcatttcacataatccccaggagagccctccgacactgagatctgaaaagccctggctgggacactgcagactgacagtgcggtagaaacaaagagcttttctggtttactttcagctcaataaccacgacaccccagagccccagcattccagtcagctgcggcttcactctgtgtacactgcacactaaatcaggactacaggaactatcctaagccaagaatggccagccccacaatcgcttcaaaggcaggccccacacaagcgtgcacaccacacccaaggggctgggagcacaaagctcaaccaacagcctgaggccctgcttccaaacgctttcttatttcctgtttctaaaataggctaaagcttctcctcctgactctaaaatgtatgctttaaaagttttttagacaaaaccataagaaataaaacaaaaaaaaacaaacatcatccaactccagtccctggatgcactcacatcactgggtctcacttacataaaaacacagtcttggctctcggaaagggcacctgtggagggaaggcaaggctgggctcagtggccctggccctggccctgcagggcatggcaatagccaacagcgggagaggaggctgtgtcctctgagactccttccttggagccactccgtgcaggagctagtacacccctctaggggcacaaccctttgtcctgaaacaacactgtgagaggaggaggagacaggcttttctctcccagactactaggagcaagcttggaagggagagcaaatgcagcccacagaggaggcacatctggctgggtgtggcggctcagacttgtaatcccaacactttgggaggttgaggtgggaaaactgcatgaggccaggagtttgaaaccagcctgcgcaacatagcaagacactgtctatacaaaaaataaaaataagaaaattagctgggtgtggtggtgcgcacctgtagtcccagctactcagggggctgaggtgtgaggaacacttgggtccaagagtttgacgctgcaatgagctatgatcacaccactgtactccagcctaggcaacagaacaagaccctgtctcaaaaaagaaaaaaaaattttaataaaaaataaaaataaataaaaaataaaggaggttcatcaaactaatcctttcaatctggttttcctgcaagccctctgagaaatgcaaatgtctcccacattaattaaaacagttgggcaagctagctgggtgctaattttgcatacgatgatttgacaaacacaacacaaaacctttctgcctactcccacacaggcctcctctctactcctcaccccatcatcacccatgctcagcacaaaccctggaggggtatcaaaaaatggtgaatctcaccatgtggtctcaggagtccaccccactttacagtgactgtgcgcattaccacagggccaactgaggcctgtgcaacccctcacagccaacctgttcctactgaagccacacaacaactcagcctgcctggaaggacgaagacacccttctgaatacctgtcctcccccaggtacctcaggcaacttggggttaggaggcactggcagggcccaggacccacgtgtgccaacaacccacagccattcacctaggcccatgatgctgcggtgaaagacatgtgaaccccccagaatgtggcttctgatgggacatggggacctttatgataaataatgatgtaaaatttaagtatcaatttcttccatgaacatgtcctccaaaaatgcctgaaaacagctggccttcaaagtatatgtttgccaggcatcttaacaccattcatctaaaccataaaagaaagaatttgctaggcaaatttcagtcctaccatgtctggaaattctaaactaatgagattttaatgataaactttctttcttctgatttagacattctttcatcctcaggcaggactagaaaggcttggagggatgcaggggtccctgctgtgtgatggagcagggccaaggacatgaagtccgttgtccctagaagcaaagtctctttgctccaaggtccttacccaggtgcgtggacctgtcacttatgggctatttcaaactacagcctctgtcctggaagcctccgaggccccctgacaaaacacaatcaaacacatccaggccagttctcagaataatcacatcatgtagccagcgagtttagctggaggcagttccagaagtggggcaaccacatggccttacgtttaatgcttgggtgaacatgctcttattgcacaccaggggcacggtggtcaccatcaccattgccaggagccgaggcaagggtataaactctctggtctgaaatgcccgggaaatctccggctgagcctcatagatctaggaaaagcaaaaaagagatttaggtggtgctagaagtaagtttcaaacctgagactagctgtaggcacccaaaggtgaagccattcaatcaaataattatagcggtaaaggtccgagactccccacaaggcagagtggaagattaaccctcaaatctacttgtcaaagacaaatcaggtcaggagactggctgttaacagagaaaggaccttcagagcagaacttgacctgtggtctgcagagtctcttaaaacctctgatggcaaataaatcactgccagaactacgaatggtactacttaccagttcttgctgcacttgacaggcacctgacaaatgatgtcaggaagggatgtcaagaagccatcttctcaaagcttcctcacaacgctttgggataggcacactttacattaaaacaaaaatatattcacagatgacaaaattggacctcagtgaggttaggtaatttccttaaggccacatagctagtaagcagccaagtaaggactcaacactgggcctgcaaaaaccacacactcacccctcccctatcctacaaatcagatgtttcatcagatgcagctcctagtaggggtgctggccccaggactgtctgtaccaaaacaaggggtggagtacatcctcctcatcccaagggtaaatgtggagactgtgcgcataggcactcaagcagaataaaagctggttttatagataatgccaggcccaggtagaggcacaagaaacaatcccaggtattttaccactaggcaaaccatgaatcagtgacagagagttcaaacaagtcaggcattactgccaaagaacagtaggtacctctacttgtaaaatgggcagatgctgacattatgatcaaaaggaaggtaacgcacatccacttaaaccagcagaccaacgttccacagcttatttcaagttgttctaattgaagcagcaacctttaaaaactatcctacaagtcagacatttcattttattttactttttatgagcccagatggagaagagataatcgggcaactcatcaatcccagtctaactgtgctgagactcaacaagatttcactctaagcaaaatcttgatgaacaggataaattggctcaaaagattctaaataaacctcaaattcagctcagtgaaaggcaaaacgctatagaagataaggacaccaaatttacatggtctaaaatatccctttttatccctgaaaggtcttcatattgtatagtttaccagatgagaatgtctgcctgtcccctaactccctatgcccccctacctagctaacagacttatttttttgagatggagtctcgctctgtcacccaggctggagtgcagtggcgcgatctcagctcactgcaacctccgcctcccaggttcaagtaattctcctgtctcaggctcccaagtacctgggattacaggcgcacaccaccacacccagttaatttttgtatttttagtaagagacaggtttcgtcacgttggccaggctggtctcaaactcctgacctcaggtaatccgcctgcctcggcctcccgaagtgctgggattacaggcatgagccaccacgcccagcttagctaacagacttttaaatatcatgtttttttaccttgtttagtagtttgatattatttaaccaagtagacttcgctcgtgggataaaggaaaacgttacttccttgaagtatttgttcagtaagtccgggcacactttgaggatgtttaccacaaggtcagccaccagatcatcatcagctgcagttttcaaacccagcaagaagtgcaagagtgtcaggtttccgcctctgttagagaaagacacatggggagaggtcagcagaaaatggtcaaagcaccctgagagctcatggtgacgtgcagctctgcagaattgccctcagtgaacacagcaataacaacgtagggaatttcccccaggacgtaaagtgggggttccgtggcctgggggttccagctctccacagagggcttccctctcatcctctacttctgagtggctgaaaaagtctctgtcctgcgatctttcttctttcctacttccctcccttgagttcaatttgctttctaaagaaaaggaagaaaaccattctctctcgctctacctcagccacctaccagtctgcctagaagtcaaggctactgaaaagaaaggacaaaaccagcagggaggaatccatgccccaaatttcattttgagattttactgacgttcctcctccagccacacacaaaaaaagcactatgtagggctggctgtggtactcacaactgtaatcccagcactttgggaggccaaggtgggaggatcacctgaggtcaggagttcaagaccttggccttgaactatgttggcttggtcaacatagtgaaaccctatctctattaaaaacacaaaaaaattagccaggcatggtggtgcctgcctatagtcctagctactcaggaggctgaggcagaagaattgcttgaacctgagaggtggaggttgcagtgagctgagattgcaccactgcacttccagcctgggtgacagagtaagactccatctgaaaaaaacagcactatgtaaatacatatgtgagtgtgagtgtaaaaaaatgcagataagacatttttctcttgaaagggggatttgttttaatttttaaaattttttattatttcttcagagacagggtcttgctctgtcacccagaatgcagtggcgtgaccatagctcactgcagcctcgaattcctgggttcaagtgaccctcctgcctcagcctcctgggtagctgggactagaggtgcacaccaccacatctggaaataaagttttttttatacgaactgctcatgagttgctgcatggtccagagcgccattaaattatttcttgacaagaaatctgacaagacagcacgaggtctttgcatggaccttctgccttccctgtttctagcttatttcaaattccttcattttcatttagcagatgaaagaagctaggatgtggaaaaaatctaccgtagaaaaatactgaaaagttatctcaaagtggacagtcttcaaaggtatgaaaagataataaaagcaggtgagcccaggacttcaaggctgcagtaacctacgactgtgccactgccttccatcctgaacaacagagcgagtctccatctcaaaaaaaaaaaaaaaaaaaaagtaagaagcaggaaagtctgcagagactaaaacttgcataaagggagtaaaatcccaggatccacacagccaaagccccaggacactaggcttcatctgcttcaaagtctttttagaaaatatgccctttcctatctgcttgaccctgtgaagtcaaaacatccagaaaatcctcagactctgtctcatgtgcacgacacagtgatggtttctagggtccccggtgtctcacatcccccttataaattgagtaaaactacaatgctatatgagagctttacatatagtaaaaaaagttttttaaaaaccaaattagaaagtataattttgatcagaaaaactatcctttaaaaaaggacatgaaaatatcctttcctaatatgaaaatgtcatgaacaaaatagtttgtactgtcaaatgaaaaggatattaaatctacaaagagtgctaaaaatactacacatgctttattttaatcaacaacgtaataaaatggagagcattaatatttatgtagtgcacaacacatgccagacactgctctaagcagttaccaccacgtctctgcgacaggcactacttttattcccactttatagacaagataatggaggcagagaggatgcctaacccagtgaaggtctcagagctaagttgggattgaagcccagctgtctgctctgttaacctacaccagcgactggcaaagtagggcccagcacctatcattgtaatttgattgggacacaggtaaacctacttatttacatctatggatgctttgctggcacaactgagtggtcacaacagactgtgtaggctgccaagcccaaaatacaatctggccctttgtagaaaagtttgccaatccttgctctatgctctaacaccagctttcagtgaacacctactatgtgccaggcactgtcctagggactggaggcccataatagaccagcgcccgttctcaccacttctcaccaatctgataatgaacaagcaaataaataaatcagcaaataaatgtatgaacagtcagaagcctaagccaggcaaaaagcacagtgacagtggagggactatttcagaaagggctgtccgggaaggcctccctgaagtggtgaggtctgcacaggaacctgaatgaaatgaatgagtgggccacgtgtctactggggaacagggaacgatgcaattcagtgttctcaaagctttctatcaccatccacaaacaaatctccttcctttcccttatgcacaaacacttgtcttttgcccatggcttcaaaattcacataaatcacagcttgctgcaaagagacgcacacccacaagttgattcaatatgctcattaaatgctcatctatttcatgggcctagttatggaggaaaaatgctttaaaaagggggaacaatgcatgtgttttaagcatggtgtaatattctattcgactataaaagtctgctgttatgttttggcaggaaaatgagctcattcttactgatgaaagaaaaaagaaatgatgtgacaagttaaatcacagtgacctcagaatcaaaacacgtccaaagtcataagcagacagaaaaactcccaccatgttattccattctgaaggaatcacctgatttcctgactggctgaaattagaagtaaatcaaactgcctaaatccttgtgatataatgctaggatagaataacaaggattaaacaataaatcatttacacatttacaatgacaagaaaacatggccaatatttttattgtcaagtgggaaaaaagcagataggatgaacagtagtaagccatttttgttattaaaaaaaaaaatcacatagacctgtattatacgattacaaaaagaaagtcttaaagaatatgatcaaaaccagtagatttgaacttaatatgtttccttactgatgaaatgttaccacaattgtgaaatgtgaaacaaaatgttaaaaaaaaaaacaattttgaaaccgtgactcatgggcagcctgtcaaggagagggaggactgttttagtatcagtttggagctggacttcctggattccagtgcaacctctgccatttaaccagtgtaagtgtctcgacctctctagaactactttcttcctctgcaaagctggcataacaatggtacctgcgtcaggactgctgtgaggcccatgtcagggccaaccctctctggcaaggcagacgccttttctgagctccagctgacgaacactgtctttaggtaaacatccgcagcacctccctgggtgaaatatcccatgacctaactaagtgctaatagacagctaccctcagaactgcccctgaggacatgcaacaaggagaagttctctgggactacaactgttcaaccctgaaacgagttagataatgtccacaattctagttctaacctactacagttccactagacactcacatatgtggtgacttctgaggaacatacacaccctggggtccacaagagtgttatactttacctgccaaaggtacccaaagatgcatcgtaaaaattaattccatgcttgagtgaacagcaaagatccatcaggaagttatgaacaagctcccgcaccatggttttccctgcttcttcggcagaaacctatgaagattttttaaaaattcaatgaaaatcccaagctcatacactttagtaagagctagagtaaaaacaaggacaatattaactgccgatgacaatttagaaaacattttaaatacttggtgtcattccaaacaataaatgaaaacaacaacaaaaagatacaccgatcaagataaaagaatactctgaagaggggcaagtttaaacctgtatttttaaaagctttaaagtgatctaatttctcttgttcatttgaataaaattccatatttgggagtgtttttatgcagcctctgaggcttgctggtctagagcatacaaaaacatgttcaaaacaagaggacctgggcaagtctccaagataaaaggaggtgaaatattaggctcttgagaggtgaattattataacgttaacaggaagtctgtgcctttactactctggccaagtccatgttcagtaacaccctgaagaaaattaaaatatacactggcattgggtcgatgttaagagcagctgtttcaatttagcacgagttaactagcacaaaataaattatatatgtcagtaggtgaggctcctagacattcaggatcctgaggttaaaaacaaacaaacaaacaaaaaacacacaacaagccttgaaactccaacaactggacatgaaagaatggaaggatgggaaggcagaggtaaagcaagaggaaaagatggccgggatgaccctgcaggtctaacaggcaagtgctgcagggaaaactaagatatggctcagcccaaggaaatcatagttttctaattaaaaaaaaaaattattagcatgattaagaaattaggggaaaaaaatcctattgcagttagcagagggttaatacaaccatataaccacagtcaaaagaaacagatcaaatgaggggacttcaagtctggtgcggtgttgagaattctccctctcccaaccctgaggatcaaattccaacaacgaggtcaacgaaaaccaaaaagtgtctgcaccttgacattttctgggttcacatcggtaatcccattccagttgtacagcgatgctatgtggttcaataactgccccgtaaagaaacgcaccttctgggtttttgtgatatttttattgtgaactacctgaaacaataataaaacaaattattaaaaaacaaattatgaaaaagttcatggaattcaattattttttaaatggtgcttactgttttctcatcattataaaaataatgcttgctagtggcagaaaatttggtttaaaaaaaggaaaaacataaagggaaattcaccaatattcccaaccatcctaggatatcgttactattttgatatatttcctttcagtcaccacccacacccacacaatatacatgtgtatgtattcattattttttgcctgagattttatttatatatgattacttatgaagcataagccttttccacgtcattaaacatccctttagaacattttggggggctaaataccattctatcctatgagtggaccacaacttatctaaccattcccctggtgtttacaattagttgtttctaaattctggctattctccataaagctgtgattagcatccttgaacatagtcttcattgcatctgactttggacttgacactggttcctgcaagtagaattgtggcacaaattctcagctccacccaaacctaaccccagaatccctatgggtgtggcccaggtatatatatttcagatacattcccctagaggttctgatgcaactcccccagttcagaacaaccatacgtcacggtccatgaacatatttaagacctctgacacatcctgtcagaactgttatcttccataggggatacaacacttcctcctcaagaaagtatctgattcaaagcatccttgctagcactgaacaccattgtttttaaaagtcaatgctattttagtaggcaaaaaaatctgtatgtcattatttgctttactttaaattagggtttctcaacctcagctctactgacacttggggccaggtaattgttatgggggccatcctgggcattacaggatgttcggcagcatccctgctgtctccccactaggcaccagttgtacctccccagttgtgacaatgcaaaatgtcttcagagattgacaaatgtcccgtagaaggcaaaattgcccccatttgagaatcactctttaaaatacttcgaaaataaagtcctttcatgcttattagccattttcatgtggactctggacaacttgtcatgttgggagggtcatagtttttcttactgatgatttaaagtgtttctgtattaaaggcagtgatctttttagcaagttttaaaatatcaataagatgcttgcaaaaggcagaatatggaacatgacacagaacaacattttgctagatatgtgaatgaagtattatttataatttacagctcacaatgattactttgggttgctgtgaaatgttgaccagcagcttttctgctgctgtaataaaacagcagccatgtctggacatcactggctgcttcagctattctttaaccttctagtcccaggatatgctcatcaacaagaacaagtttctgcttagggaagagttttccactcaaccaatacaacaatctatgtaagataagatgttgtagctctacagtcctgtaaaacaccggagaatatctccattcccaagggaaaacagacaacagaaacgcggatcaccaagcacatacctttgttttcagtgtggataataaaatattgatggtagagatcctatcttcctttatccctgagctaaaaatgcaaggaataaattctgaaagtaaaagtttcaaagcattaaattcaaaaatattttgaaaatgagaatagacgagagaatattactgtttaggtggtacagcaaacaatgccatttactttttcaagttttttttttttaactatacaagtttccggtagaaataaccacttccatgacataagaaatcaagaagccaggcagagtggctcatgcctgtaagcccagcactacaggaggccaaggtgggaggatcccttgaggccaggagttcaagaccagcctgggcaatatagcaagaccctgtctccaaaaaaaaatttaaaaattagctgggtatggtggtgcgcacctgtagtcttactgtagtcttaggtacctaagaggctgaggtggcaggatcaccagtacccaggagtttgaggttgcagtaagccatgatcgcaccactgcactccagcctaggcaacagagcaagacgctgtctccaaaaaaacaaaacaaaacaaaacaaaaaggaagaaagaaaagaaatcaagagcacctacaagcgaaccaatgacagaactttttaagaagttcagtaggtctttagttccattttacttttcttttctcatattaaaattaactaaatactatttgaaagagaatgtacggtataacaaactaatacaatttctctcttgcttagacttgctgagatgtgtttaaagagatggtcatgattttttaagttggcagtagaattttgggtgatttagtttgtttactttttgctttctcttcctacttttcaatccccaaggaaatggccaccagagcttgacactgttatcattattaatgcagtagtgacagtgggcagaagcagcaaaacaattacaaatttccttgctccacacatgcttactgggcacacagaatttctacaaaagcaaattcattatttgtgaaaaaggaaaaatcagaaaataccagacaaaccaaaagaataagtcaaagcttcagtaccgagaagttaacactgttaacatcatctgagttaactattacccttctgatgtattcatgctactctatttgagtaaaatgagatcatactttatagttttatagtttacacccaatcatatatcactaaaaaactttgaaatcattaagtgcagcatgttttttttctttttgagacagggcctccctctgtcctccaggctagagtgcagtggcgcaatctccacttactgcagccttgacatcccaggctcaagcaattctcccacctcagcttcccaagtagctgagacaacaggtacacgccaacacacccagctaacttttgttttgtttgtttgtttgtttgtttgttttggtagagacagaatctcactatgttgtccaggatggtctcaagaactcccgggctcaagcaatcctccagcctccaactcccaaaatgctgggattacaggtgtgagccacgacggccagcctccagagtatttttaatcgctgcattccatcttatgaccagtccccaatttgctcagccaatcccttactggtggatagttagaagacccatttccagctaatataaatattattccctaacaaaacctctactcacatctttaattatttcactgggataaatgactagacatggaattgcaggatcaagtatcttaaaagtttttttatcttttttctttatctattgtgcaacccacttcagtgccagcagcctacgggaacagaggccaggcaatggttcagggctacagtttgctctggcatggggtactatgagaggtccagggggacgggcccatcataaatccaaacccatgcataagcaccttaaaagttttgatgtgtacagccaaacttcccagcagaaacattaaactgtagtatgttccagcccccttcaacagtgtaaatggtaccaactgtcactgaataaaaggccagacagctgaaatggcccacgggaatttgaagaaactactggccctggcagcagcaagatatcctgaacctagtgcctggtaacaagtaggaaaaaaaaaaatctgtccgctgcattatgcagagaccacatctccactctcatgctgctccaccacagcagcaatagagcgccccacacagaccaggctgaccacatacagggtgaccgccacctgcactctcctcctaaatcgtcccggcagtcacgttccaggggcagtccagatctcccatcctgggagggagaagaagggctggagacccaaacaccctgagtacagcaccctgctactcctcctcaataactcccagagttccggccaggacatgggactgctcctcacctccagacaggccaggattccagggaatcttaccgagcaactgccatgtgctgagctaagtgctgccatttatcatcttagtgaatctcttgataaaatgcaaggggccctggcagattaaatgatgccaagcctcactctagggacacagccaccaaaaggtggtcaagttggaattctctgaagccctgttactgatgttctcgtaacacaggtctaagccaccaaagaaactaactttgttttttaaaacgacatctcccaaggaaatccaggtagccaaggctatgagtctgagtaggttccatagccataaagcctcctttgtttgcccgactctgcctctctgaagtctgcatttatcctctgtgacggcattgttcagcattccagacggcataacaggaacaactctgttcactcttgaccagtgatatcaaaatggtactgaccaaggctttgcacccgctcacccacctccctgccccacatccttcaatctggtgtacacagcaactgcaaaggctgcagactttttttgaacttggaagaaacggtttgcagtaggtttttcaaaacaaatgggctttcctaacggacaagggagtacacctacctttcacttccaacacctgcactatagtgctgtcatcacccgcaattaaaaaggagagagcaaactgaacgtaggcctgccgaacgtcgtacactccctagaggacaaaggagacctacatgtcacatgcatattccacatacagccaaaggaatcagcaacacagtggccaagcacacccctcccgtctcaacatcaccagccccccagccttgtccccagtcaccaggggatgcaagtctgaaaccaatgctcattctccatggaaagtaaaaaattttttccgttctctttccccggtaatcttctctactttccttctctttcaagccctattctcaatacaaaagtatgggtaaaaaatagtagtgttcccttccctgactataacacatacattttcgtttcttggccactttggtgtagagcaagactctcagcctgcctagatccatctcctctcgcttgctgatgaaaataatctatgtttttgaaaatccagagatgatgaaatggctggtactgcttttggtgagacaccaatgtggtgatgtctggtttttatgagatattataaataacttattagctcataccacaaaccaaagcacagatgctgtcacgttactaaccctgttaggccttcccagggttgtagccagcactgtccacatgcatcagccaccaaccagggcactgggcacgtttggggagggccccaacaccgtgacagcagccagtgcctctagggaagccgctgatcagcttcccctcccagtatcattaagacaaagctgtgtcacatcactcctcgttttgtatctaaggaactcaaggcatgtggtcatgtcagtctctcatcagctgttccagaactagcaggtgtgcctggatcctccattgcttacacccagcactattctctacttcacagttactccaaagataccttcattcactgccaagaaataagttaatatcacaacaagtcactgccccaaaatgcctgggaaaattaaggagtaatctctgccttccagatagttctgttccacttagtagtagcaggagaggtggtggcagtagtagtgatgatgatgaggaggaggaggagaacaatgtttacagagcacttactatgtgccaggcactgtatcaaatgctgcacatccgtgatctcatttactcctcataacagcctgagggagagatgcccacaccacacccattttacagatgagaaaactgagggttcaaaaattcagccggacacggtggctcatgcctataatcccagcacattgggaggccaaggagggtggatcacttgaggttaggagttcgaaaccaacccggccaacatggtgaaaccctgtctctactaaaaatacaaaaattagctgggtatggtggtaggcgcctataatcccagctactcgggaggctgagacttaagcccgggaggcagaggttgcagtgagcagagatcacgccactgcactccaacctgggcgacagagcgagactccatctcaaaaaaaaaaaaaaatttcactcgaggtcacacagctaattaagtaccagaactgagataagaagtaattgtacaaacatacgacttatgttcaactacagagaagttcttccttcttcacaagattctgtggcattttccattttcatttcactttttctcagggtgcaaggaccatacttggcatcagttaggtctctgtgcaagtctttaattaattccatcttattttgttgggtctatgtttcttctggagaaaaggaaggctatccaacccatgctccctaatatgtggatcaaggccttgcacactcattacatttattgagtttatccccgtccatgtcacacagcatctcagcaagaccttattacaccaatgtgagtttcttccaaaactgagaccttcaaactatcctctctgttctgaggacctatctgtgtgtctcatcacaataaggagtttgcatccaatgatcactggtgctgagaatgtgcagcacttccatagtgtcagcaacactccagtgccttaacccaccaattcagtttttatgaaacactcattccattcaagatgccatcatctcaggccaagagagggtgcaaagtttaccaagatgttgtccctgtcctcaggaagcttaagctgctcccaagccatctctatgcctcattgttcaaataaacataccatctaattcaagcagttaattttcttgatctacacacaccttgtgttccagatgaatgctggtaaaatgctaaaacttgcctggcaaaattaaattaagttctgtcttttccctgctagtggaaagttcctgtgcttttattttgtgtccactgaagtaacagtactgggagtcagggccctggaatgctggtccaggttttctgccattctacatctttctatcctgctggtacacagcagaactagacctcctgtgggtccctccagcaatgaatttataaatgaaaagggatttagttatcacctcctggcttccatcttttatatcccagacaactccaaatttcacgtcctgacatgatggaggaactgggtaagatccccaggacacagcagctgcccactctaggctctaggctctgccactgtcgtggccccctggggctccatcctctgtttccagtcctctccatcaaaggcgtcccactcctactgcaagtggaccacatgcctgctcttcattcccaccctgtgacctcacagggttattattccaggaagaaaacgtcctgaactcttcagggcttgttctgcaaaacactgtctaaaacagaccaaaatacacttggtaaaactgctctttggcacaggattttaacaatgctttctttggctggatgaatattatctataaccctccttcttcatgacgctttaataatttcctccaaaatgttaacatatattcattaaaaaaaaaaaaaaatccctgccagcacttcaacaactaaatagcatttaaaaaaaaaaagcaggggatggcatgagggagaaaaactcaaagacgcaaaagggatcaaagatatttaagaaacatatcaaccaaatgcaatgtggactttgtttggatcccgatctgaatcacaaagtgtaaaaacatttttgagacggaaaaaacctgagaccaaactgagtaatagatgatagtgagaaattattaatgtgttaggcgtgataatggcactgtggtttctgttctttaaaaggtctttttctgttagagtacatgctgaaatatttatagtgaaatatgattcacgtctgggatttgctataatcgactgccccagaggaaactgaaaaggtggagggtggggacagtggctgaagctggacagctggtacaggggttcctcacgctgctctatttttaaatgttcctaacagttccttattaaatgtaatgtctcaactccatttcctataacatataagatatctaagatacttattacagattacacaatgaaagtaaaaacactttcaacttgactgtaactcccattttacagatcctggagaggtaaaataatgtgccctgagaccctgagatgaaacggcttgtgtgtggccctgcagccgggcttcaggacgggaagccctttcccacgctgtctgggctcctaaagtctatttcacttagacggcggggagggctgagatcaaaagagatgggtggggagggcatctgatggataattattgccaggcttactgccaggtaagaccaaagaaccgtgatatttgccctcgtctgcaaatagcacacacattctttttattagaaacgtatttaaatgtcaggagccattactcattgaatggaatttgttgacacatggataaagcatagtatctaagagacattaagacctggaatttttttccttagagaataccttatttgtaattccagtaaaaccctcaacaccaggccaatctcacagagccataaaagctacttggtattatcaaccctttagtccaattcccggcaatgtagaaactcttagttcccagggatactgacagaacaaggcagcacactgttatagaagtgaattattctaatgtggttctccaccgcagcagatgggatggactgatacctgtccccttattctttacgttcaggaagagggtgacactctggccagggctgttcacagcactgaattccagcaggggagctgatatggcaaccagaagaggccctacgacagacaacctggagccagcacacgcgatgggaggatgccctctctcaagctcaggagtcctccaagtgtgcctgctccccaagaacctttccaaacccaagtgaaatttcaaaagccaccagggaatttttgtttcacaggtttcctgaaaaccaaccatccacactcccatttttcctgggcacaatccaacccttacccatcacaagattgtaactgggaggcaaaagtcacttattaaaaagccataaaagtcctctctgaggacgtcactggcttagagcttcaagggctttctccgaggtgggcagaacaggaacagaggactggcacacactacaagcttcagggccatgggcacatggagggtatttcatttaccaggagaggagatgcccacagctaagtcatcctcacaaccaggaaggccctgtgccactcagcccccaggagcctcctcagatatccccattgttcaggctctgccaggttctggccctatcgccagcctgaagcgagtcctgtcctcacagacagatcctgtggctgctgacacacacctttctacatagacacctctcatttcatctgtgtggggatcaggggcagagaatggaggaaaaaccactacagtcctccaagggaaggagacccatggaaggcacgagacactgtggtcccctcacctttgaatccctcttggtcaccagggtgtacagggtctttttattcaaatcaaaatggctgcagacgtccctggcagcttccggaccctgggtcaccatggcggtcatcaggctcaggcaggcgcgagccaacctgcacagggaaccagaggaaatcggacacgtcaacaacagcagaagcacagagccgcctcaccacaaagccagctgcaagctgcttgtgttatttgctatccccaaaccagaaaaaaagaaggaaaaagacatgctctttttttaaggaaaaagaaaaaaaaaagcataaagattcaaaataacgctaaaaattaaaactaagtaggattaacaatataaacacaagatttgaagaagatggacatttctctctggagtgagccactgtgtgatcaatagaccacacctcagtccctgtgactgcagaatacagaggacgacttcttcacaaaggcatctctgaatgcgagctcttggctgtctttccgttctgcggttatccagattccatggttttctgagcacctgctacatgcaaggccctgttctaggtgctgggaaggtggcattttataacacaggcaaggccctgccacatgcacctataggattccagtagagggagtcactcaacagataatagcagcaaggacagtagcaggcaggacaagagggacaaggggtaagtaagagaggagtcagggacagccagggctggtccacaaaggaagggggcagagactcggtcactgtggcctcggaaatagctcagctctcctctagccataaaggtactgaccaaatgcacctgcggagagctgaatgcagaccaaacccaaaggcccatcctttgtcacaccaaggcagactgcctacctgtaacctgaggcatacagggactcacagatgagcttcatgtggttgttcatcagctttttcacaatgttggttcccacaacatggaaatgtgaaagatcacttgctgtccgcaataatatggcctcgaaaacttgaaatattaacatcgtctgcaaagacagaattgaaacgcttagaaatcgtctcatttcctttcctcctgtacatatatgctccttttgtcttagccatagttacttgtaggcttaaagccttcaacatgcaggatgacgcccacccagatcctgagtcaaacgcgacagcttggcaggctgatctgcaggacccatgccctgcatgtagccccactcccatagtccagcaaaataaagaacagcttgttagggccaggcgtggtggctcacgcctgtaatcccagcactttgggaggctgaggtgggcagatcacgaggtcaggagattgaaaccatcctagctaacacggtgaaaccccgtctctactaaaaatacaaaaaattagccaggcgtggtggcgggcgcctgtagtcccagctacttgggaggctgaggcaggagaatggcatgaacccaggatgcggagcttgcagtgagccgagactgcgccactgcactccagcctgggcaacagagtgagactccgtctcaaaaatgaaagaaaagaaaagaaaagaaaagaaagaaagaaagaaagaaagaaagaacagcttgtttacaatcacagaaaatcaaatgagaagaaaattctcttaatgactgggtctcattcctttagagatattcagatctacatccttatagcaataaccctgagatttcaacaggcgcatcaatatcccaatgttcaatctctttggaatcagaaaacaatcatcaattcattatgtgttgtgagtctgtgacaccacatgtttatgtgtttcccttttgtttaaataaaccataccgaaaccaagtatattttgattaggaatctatgatccttccttctgatgtcattcatcaaatgttaataataagtgagaattttccactaaaatgctttcaaggtcatggaggcaaaaaatgaatacattcctacagcacagggacaaagcatcattttctatagaaagttggtaatggaaatttctatcacatttttcctcatcaaacttaacagcagcattaacttttcttctcttcatcaagccatgtaaggaacaacttacttcactttcaggtcgtttctctccacttaggagctggaaaatttcgacacactcaacagaaatctttatatacccttccacaacatcatacacatcttctcgtggtagcttcttggcagcagacacaaacgcttccaagcctgaaaaaaaagttatgttcaaacattaacaaggtcagtcttcttagaaacaatcacagccaccactgcaacctgctttccctattctgtgaccttccccgatccacctacactgcacagaagctactatgaatgctatcaacttaactgtttctctccaaaattcatgttgaaaccctaaacccggccgggcgcggtggctcacgcctgtaatcccagcactttgggaggctaaggcaggcagatcacctgaggtcaggagttcaagaccagcctggccaacatggtgaaaccccctctctactaaaaatacaaaaattagccaggtgtggtggcacatatctgtagtcccagctacttgggaggctgaggcagaattgtgtgaactcaggaggcagaggttacagtgagccgagatcgcgccattgcaccccagcctaggtgacagagcaagactctgtctcaggaaaaaaaaaaaaaaagaaagaaagaaaccctaagccctaaaaagacagtatttggagatatagtcttttaggagataactcaggttaagtgagttcatgagggtgaggtcctgatctaacaggactggtgtccttagaggagaaggagacatcagagagctccctctctgcatgtggatagaggaaaggccatgtgaggacacagcaagagggcagttgtctgcaagccaggacgtgcccttaccaggatgtgactatgccaatgccttgatcgcggacgtggccttcagaactgtgaggaaataaattcctcttgtttaagccacccagtctatggtattttgttatggctgccctagtagattaatccacaaggacattatgaacacacttagaaaccatgaaggcaataaggaatgagacaaactgagtgccaatgtgactcccaggtttgactactgagtctggcaatgactcgtctggatccccatagagcttttgttccctcaactgtagaatgggtataacaagaaaaaccatatagagcatggtaacgaaacattaccaagagctttacttacatgacatcagctaattctcactgcaaccctccaccctaggtatgagtatttttttccctaggtactagtatttcacagatgagaaaactgaggcccttgtccaaaggtacacagcttaggagaggtagagccaggactccaatccaggcagtcgggctccagagcccatattctccctccacgaactggatgattcctgctcatgcaatggagctgatgcctgttgctctgagtgcactggcacacagagtgtccgtgctgcacctggcccacagtcagtatgccaagcatcagttgacatcagtgctctttcaaaacccaaaggagggcaccccactagagtgtttccccataaggccaccccagaagttccccactcaaaaatctcccctctcaacagcctgaggattctactacccttcctgcaattaatacaacctcccctcccctaccactgacacctgaatctgaacccccaccacaaccccaccctaccaactgggagccacctgtgtgccgctgcccacagaattctcctgccagaacctgttctataaaactgcctttcagagaatcacttgaacctgcctctcggagaatcacttgaatccgggaggtggaagttgcagtgagtcgagatcgtgccactgcactctagcctggcaacagagtgagactccgtctcaaaaacaaaacaaaacaaaaaaaaccctgcctctctctggttccactctttgggccatacttctcaaaactaggaaggcagggcatggcagtgggttggaagccgcatgagagcgtaagctaaaggtaacacatcttactgaggccttcatctcttctggggagtgaagacttcaccttattcaaaaaaaaaaaaaaaaaaagcagaggaagggactaaatatttctattaaaacccacttagtaatgaccaatacagtaaaatgtaaaatgccacaaactttaagaaatacactacagtcttcatagacacatcagaatagcgtggtctgctttagggagtgtctgggcatccctaaggggtccttccttctctgccttggggccacaggcaatggatctaatccttctttcccacaccagctgccatcaccctagtcagcacctctgaacaccaaacacttcctttaacctctctccagaaatgagagtttcgagatccttctgtgttcaggtcactctctatgttcccttgaagcatgaggcccagaacagggcttggtactgcaggtgagctccactagctgagcagagaggaccaacacatgcttcctcttggacagcaattctgcgtgtctcagattcaagtcctgacgctgctaagccacatctgccggggacgcatgagcacgccattacaccaaaaacataccagaaaagaacaaaattggagccagactcctgggcacaaatccccgctcagtcacttactagctgcatggtactcagtaaggcactgaactctgagctctgggtacctcacctgtataacggaacaagaacagaacctacctgacagggtttgtatgaagcgtaaaaaggctaatttacacataaagcatccagcatcacacttaggtcaaggtaaaccctcaaaacataagcagccccccgggtgtcctcagcagcagcagtgaaaatccagtcacattcggcctctgccagcctcacaggtgttttcagatccccttttatgctgcaacattttccgcagcaaccaccgccattcctttaacagtcactgagcaagtgcatctgctatgccaggcgctgctctgagcttcggggccagactccattgctgccgtctgcagcgtggtctggtggtgattatgagcaggccatgggtgttctgaccaaggtgactgtgagttacaggagctcagtcggcacaggcaccctggagttatgcatacctactctgtccctcaagaaaacacagaatgcaagtgatagcaagggctgttaatacagaaagagcagtgcaactactcactcttttttaaggaattattcgtcaaactctagcatgtaactctgagcattccagagtattacagggtggaaactgctggcctgttatgtttgccgtctttacaggttcatctttccatacaccatttactgggcacctaccaggtgcacctacagggggtgcccgagacgtgctgatgagcaaattagaaatggcctctacccacatggtccttacaatctaatgatagagaccaatgtgagtatttattaagcacctaccgcaatcacttacatagacacgtatagcacctgtagtaagtgctatgaagcaaacatcaagagtataatgaggactgtacctagggaacatgatctagattagagggttgggaaggtttcctttgaagaagtaatgctgaacctattattaataatagtaaacgtaagtattgagggggcagagggtgagaccacattccaggccccaaggctggagggtacactggagccaggtgagtggggaggggtgactgagtgagtgggggagggcagcctgagatgaagtcaaagaagcaggcagggctagatgaagcaatggaaatgactttggattttatcctaagggcagtgggataccactgaagggtgtcatgagaggagtgacataatcagatttggagctctgaaggatcatttgactgctgcacacagcacgggctgcagggaagcaacagcaagagagaccaactctgggcaactccagccacggtcccagcagggactgatgatgcctggactagaatgatgatgaaggaaagagggggagcagacagattccagaaattctcaggaggagaatcaaccaccaaggccaggggacagactgatgcagacggagggttctggcaggaacatccagctaatcagaattaccacttatgcagtggggaaaccagaagcaatgtggggagaaggagatcaagagtttaaccattagtgtactctcttacagtatggccttttctctatcaccagtggagtcgtgggcaaacactttcaaaggaactggcttagagccaaacccttcttgatgggggatcttcccacaggctgacactgatccactctggaatatcctcagtccttaccaatctaacctggcagctcttgttcctccactacacgaagggagcatcatcagaacccttccctcacatgcctggtgaaaacaaagtctcctaacagccatcaacttcacttccctgatcttccagcaatcctatcataggttatgagagcgtataaagaggaagagaggaggagagaatccaagatacagaccagattcaaacacaagttcaacacagcctcaaacaagggatccacactttcacccattgactcagctttgccccatctttcaactactcacctacacccatgccctgtcaacctgggtctccttctgacatgtgttcaaatgatgtagcacctgaatgtcatgaggctctctgtgcaagaccatgaaatatagatactacatctttttaacaattaaacgtgctctttcttctgccagtaaggttcctgtccctgtcccatcctacaatccttttgaaaagccacttcctctgatggccagtgatgatgagcattttttcatgtgtcttttggctgcataaatgtcttcttttgagaagtgtctgttcatatcctttgcccactttttgatggggtttttttttttcttgtaaatttgtttgagttcattgtagattctggatattagccctttgtcagatgagtagattgcaaaaattttctcccattctgtaggtcgcctgttcactctgatggtagtttcttttgctgtgcacaagctctttagtttaattagatccatcagagaaatgcaaatcaaaaccacaatgagataccatctcacaccaattagaatggcgatcattaaaaagtcaggaaacaacaggtgctggagaggatgtggagaaatgggaacacttttacactgttggtgggactgtaaactagttcaaccattgtggaagtcagtgtggcgattcctcagggatctagaactagaaataccatttgacccagtcatcccattactgggtatatacccaaaggattataaatcatactgctatcaagacacatgcacacgtacgtttactgtggcactattcacaatagcaaagacttggaaccaacccaaatgtccaacaatgatagactggattaagacaatgtggcacatatacaccatggaatactatgcagccataaaaaacgatgagttcatgtcctttgtagggacatggatgaagctggaaaccatcattctcagcaaactatcgcaaggacaaaaaaccaaacaccgcatgttctcactcataggtgggaactgaacaatgagaacacatggacacaggaaggggaacatcacacaccggggcctgttgtcgggtcggggggaggggggagggacagcattaggagatatacctaaggttaaatgacgagttaatgggtgcaggacaccaacatggcacatgtatacatatgtaacaaaggggcacgttgtgcacatgtaccctaaaacttaaagtatgattaaaaaaaaaagaaaagaaaagccacttcctcaggggagccttctttgagctcccagattagatccaaggtctgttaaacaccctcaggcaccatgtacctctcctttggaaaactcgtgcttgaaactgtatgtatgtgattttactgaccaatatctgcctgccccactcgactgtttgtaaaccccacaatggcagaggctttttgacatttttattcatcactttatctctaccgtagcaaataatagcctctagtaatacttaatgaattcggaaataaataactctatgctaactaagtatcatcttcctagctgtgactagcaagtacaggtataggtatcaaagtttaaaaacaggccaggtgtggtggctcatacctatactcccagccctttgagaagacaaggtgggaagattgcttgagactgggagttcgagggcagcctggacaacatagtgagattccatctctacaaaaagtaaaaaaaaaaaaaaaaacatagctgggcatggtgttgtgcacctacaatctcagctacttgggaggctgaggtgggaggacagcttaagcccagaagttcaaggctgcagtgagctatgatagtgccactgcacttcagcctgggcaacagagcaagaccctgtcgtttaaaaaaaaaaatgaggacaaaaattggaagttgaagatattttggccattaatttaatcgtttatttaacctgggagaaaaactgccactgttttattttagagcaatgcttccacatggcaacacgttcaattgcgtttttcccaaaccatgttactttccaaacgattacaagtagtcgcgaagggtggtcacactttacaaaaagtgtaattaaattatagagtcggctacatctcagtcactggcccattcctggtcaactgacaagtagctgtggtggcttctagtagcttgttacaagtcatcaagtcagtatgagtgttgggggatggaagctattgaaaacggtgctgacggcccaaggagtagcaaactgtctcatgaaccgtcctgagccgactcagtaaggactcaatagagaaggacacttcatttacttccctgacaactgcaataaagaggttttagagctcgctgagggatgctgcctgggcaagggaaataaatgtgttgtaacatgaaacggtcccaatcaagcaagtcggggccctctcgctgtcgccgacagtccagagcaaggaagtacacagcagtcctgaacctcagttttctgcaaaccagaggcttgccactgagcctatgtgacccgaaagctgcagaaaggagaggctgtgcccggcacacggaggccgcctcgccagcctgtgctcccgaccctgcgcctgccgccccggactcacctggcccggggccctgcgggtccttcagctgagccttgaaccgcacgcccgtgagctcttctttgcgggcgcgcttggctgcacccgcggaggaagccgcgccgtcctggccgcccgaggccttcctcttggggacccccatggccgagagggcggaagcgcgacggaaacgacacacctgaggggacccggcaggagcactggcacagacagcagacacgcgcttcaggcccacatggcgcaggaagaggcggggctggcggaagaggcggggctggcggaagaggcggggctcggggaaaggccggcggaaggggccgacccgcgcgaggctgggaccggcggaaggggcgtggcctgcagaaggggcggggcgatagggatccagagtcttggggatccagagtcttggggctccatgtgagtttgctgtaccggttgtcccggtcacggcatggggcgagcggacactccacgacaccccccgcccccggctgcagggtttggggtccaccggggcgcatttctgatcccagtggctcttcgggtgctcttggccggaagaactcccagacctttcactcctggcctggccgatccacgaagactcgggccccggcgcgtccaagcagcacaatgagtagttcttgacccgaggtcgccctgaaggtgtcgcatgaagagcttgcttcacacacaacaggattcgatactttgccaattcaaggccctggtggctggccgggaaggtggattcgccttggctaggtgccaggcaggtccgcctgtgcgggtgcccctgacttcgacccctagcttatgtcacagcccgaaccagatcgactggtctggtagcagcctgtcactccagactgtcctccaccccagacttccgcaaactgatgggctctttgcgccgtgcagggtgggaggagaagaccaaacgaagtaacgtctgtaaaaccccttcctggacagcgtaaggcctccacatctaagttcctgtcattaaaatggagacagcaaagccgaccctatccagtccttgggactgttatgaacagaaaatgatgcaatgtatgaaaaactgctttgaggagaaaaacaacacagtgtgtttttggaagatgtgattgatttgtaaaccgcattaaatgctctgaaataaaatgaaagtaaaaataagtaaaaacaggctggtacatattttaatacgacttcatcgatacttaggtatgtgtccaaataaatcatgaaccagcgcattagataagtaacttggtgattactgaaattctccatcaggttgtcctctagtctaagaaaattgtgtttcatattctgtaagcagatgtgttttgaacatctgaggatgtgggcttttgtggcctgttggggtctcagagtttctagtagaaaaagcacgtgtgttgacgctgagcctctgtcccgacaagatgattgtgcctgtggagatgtctatgttgtaggcaggtcagagagagggtgtcacccctagcagatatgagctaatgcagcaatgttaagagaggggaatatgctcaaaaagtcatctgtaaaaggcaacactcattagtgaatacagacttaattctgactgattatccacactggtcctcttctttggttaatcgctaaccaccaactttgttttctgccatggtggtcccaaccaaaaagttatcagaaagagttaggaaacagtcaaaagccctgagttcagtttctgcctgtgtgaccttgggcaaattaccatccctctgtgctggtttgctttacaaacaattaaagagcatgaggaacttcccaggattatccagctagtaactggtggagccaggactcacccagtgtatcctagtcccaaattaaaaacaaagaaacagaagttggcagtgcccatttacagccttagccagagatgtatggatggcaagtgtggctcagaagtgcatttggatgttttagactaagttaatgccatgaatcattgatgctgggttaaccctttgttcagatatgaggctcaccaacctctggatagtgacttgtctttccatatcaaagctttgtattatttgcctccaggagcattctggtttgttgcagactatgtggtactgctcctaggacattctaagctgaggaaaaaagcccgagagcttttgtacttgttccctctctttgaaactctttgcccagagctcaagtggctcagatgtggacttttcctgtacatacctcactctctgtctcccgacctttcttgattgggcctactttataaagacactcactaattacatctgagggctccaccctcatgagctagtcacctcacaaaaggcctcccacaaccaaatatcacacttgggatggggtttcaacataatgaatttgagggggacacaaacgttcaaaccatagcactttcccaacatgaagatgatttttcagttaagttctaacaatcttttcagaaacagataattctcaccttgtgccgttagttccacaaaataaaaaataaagtatcccaacatcttttacgaggctcatataaccttaaatacagaacaagctaaggataacacaaagtatgaaaatgatgaacttatttcaagtatggatataaatgtgtgtaaatagaatattagttaactgaatacaaaacagcacttgaaaaaaacacaagaaatacaaggaaagaatatcttgcttatataactcaccacaataatggattaaaggagaaaaatccgttattatttcaatagatggaaaaagacatttgaaaagatacctatttatgatttttaaaattcacataaaactagggatagaaggactttccttaacttggtaaagactatataccaaaaacctgcagcaattatcatgcacaatgggaaaactatatgaacttgaattatgactgggaacaataggaaaaacagggatgtccaccatgctactatctattacgagaggtcgtggctagtgaaataaggcaagacaaagaaataagaaatgaaactgtaatctaattggaaaattcaatagaaatgcaagctaaataagaatttagcaaggttgtcagacataaaatcagttaccaaaattggtagcattacctctacattagcaatagctaatttaaatatgtaggagaagctgggtgtggtggctcatgcctgtaatcctagcgctttgggagactaaggtgggaggagcacttgagctcgggagcaacatagtaggacctcgtctctacaaaaaaaaaaaaaaaatttaagtagctggtgtggtggtgcatatctgtagtcccagctagtcaggatgccaaggtgtgaggattgcttgagcccagaagaccgagcctgcagtgagccagattgctccactgcactccagccagggcaacagagggagaccctgtctcaaaaaataaaataaatataaaacaaaaataaataaatatgtggtagaaaacaaagcaccatttagaaagaaaaaaaccctacaaattctcagaattaaactaaaaagactgcacagcatctttaaggacaacattgtaaaataatatttggttaaataaagatacatactatgttcacggaagaatgtcttcacattgtaaaactgctaatttttcctaaattaagctgtaaactattaccattccaataaaaattaaattcagaaaaccataatatattcttatggaaaaagaacaatccaggaatagctaagtcagcttgacaagactaaaggggatcttaccttatgcatgaagacgtatctcaaagttgcaatggtcaaattagaatggcagtggcaaaagaacagacaaataggctgggcgcagtggctcacacctgtaatcccagcactttgggaggccaaggcgggcagatcacaaggtcaagagattgagaccatcctggccaacatggtgagaccctgtctctactaaaaaaaaaaaattagctgggcgtggtggtgcatgtctgcaatcccagctactcgggaggctgagataggagaatcacttgaacctgggaggcagaggttgcagtgagctgacatcgtgccattgcactccagcctgggcgacgagagcgaaactccgtctcaaaaaacaaacaaacaaaaaacaaaacaaaacaaacaaacaaaaaacagacaaatagcctggtggaatggaatacagactccaaacagatctatgtaatggaggtacaggttaacaaatctgaaacttctttttacatatcctggaattgaaaaataagtaaatggataaaggatggtgggagccaggcttcacactgttggaaaaggaagttacatataagcaaaagggtaaggctagaacggaccctgtgatactggattagagttggaaacaccagcatgatctcatgtttagtttaacacaggtagagatggattggtacagaaataagtataaatacatattctacctgggtttgtacacaagcatatatttcctagctctgttcactggtagggcctagaagcagtcacaccccagaagcaatgagcacactcagtgcccagatcttggtttctaataccattatcaaataaaaggaaccagggtgggtgtggtggtttatgcctgcaatcccaatatcttgggaggccaaggtaggtggatcacctgaggtcagaagttcgagaccagcttggccaacatggcaaaacccccatctctatcaaaaatacaaaaattagctgggtgtggtgtcatgcacccgtaatccccgctactcaggacactgaggcaggagaattgcttgaaccagggaggcggaggttgcagtgagccaagtttgtgccgctgcactccagcctgggtgacagagtgagactccatctcaaaaaaaaaaaaaaaaaaaagagaaaagaaaaaagaaaaaaaaacacacaataaaaatataaaaataaaaagaaccaggactccttagagaaatggctgattctagggctgggacagggaacacataaggtgagtgtggagtatcttgtagtaccagaaagtaagaaatgcttcaaaaacaaaagaatggagctatgtcaaagagtcacaggaaccaacttgaaagaactcccaatggaacagtttcggtgacaaaatgaataatatagcattggattataacctagggtaaaaagtaaatatatgtaagtctatactgatataaaaaatgatgatcaccaggcatgatggctcatgcctgtaatcctagcaccttgggaggctgagacaggaagatcactggagcccaggagtttgggtccatcctgggcaacagtttagcaagacctcatctctaaaagaaataataataataaaataaaaataaattgattgctaagtaaataaatgggggagaagagataaatcttccttacaaaagtaatccaaataatacatgtagatacttcctgcttccagaggtggagcttaattcaaatactcctccccacttccctagtgtaggtttagtgacctacttttaaatactggaatatgacgagggaaaaatgataactctataatagagaagcatggcaaacactaccttatccaagggatcaaagttaatgtcatgtataaatcatgttactgtgatgtacccctgaagtgatgtgatgaagatgctttgcctctgtatatccttcccgaaacccaaaatcccagcccaattgtgtggaaaacatcagagaaacctaaattgagggacagtctaaaaagtacatgagcagtaccctttaaaactgtcgaggtcatgaaaagcaatgaagaactgaaacacgaccacagaccagatgtgatgggagacacaatgataaaatgcactgtggtaccctggactggaccctggagcagaaaaaggccagaaggggaaaaactagtacagcgcaaataaaataaagtctggcgtttagttaatagtaacgtcccaatgctggttgcttagttagcaaatgtaccctacaaccgtgagaaatgtaaaacatcagatgaaactggctgagagtgtatggaatttttttcaaatgttctgcaaatctagaatcatttcaaaataaaaagtgtagtcaaggccaggcacagtggctcacacctgtaatcccagcactttgggaggctgaggtggatggatcacttgaggtcaggagttcgagaccagctcagccaacatggtgaaacctcgtctctactaaaagtacaaaaagtacctgggcgtggtggtacatgcctgtaaccccaactactggggagactgagacaggaggatcacttgaacccaggaggtggaggttgcagtgagccaagatcgtgccactgcactccagcctgggcaacaaagtgagaccctgtctcaaaaaaaagaaagaaggaaggaaggaaagaagaaaagaaagaaagaaaaaaagaaagagaaaagtgtagttaaaacaaagacctatgcatagataggaactttttatttttaattttgaaacagctttattaaggtataactgatatgcagtctaatggcacatatttactgtatatgatttgatgaattacctcctggctcctggtaaccaccattctattctctgcttctatgagtttgactattttaggtactgcttatgagtcctgtccttctgtaactggcttctttcactcagcagacacccagaataattgaaataaggttattgaagggatatttgcactccctgttcattgcagcattattcataatcgccaatttacagaagcaacctaaatgcctatcgacaaatcaatgggttaaaaaaaaatgcggtatttagtatacaatgaaatattattcagccttaaaaaaaagaaggaaatcttgatatttttgacaacatagatgaacctggagaccattatagaaatgtgatatgtgatcaagacaacaccaaaatcagtgggagaagggtggtgtggtagattacaaaatatggtcacaaattcctcccaccctggaattcatgcccctttgcaatttgactttgcagttctcattgggaggttgggacatttcttcccctgttggggagcaatttggaaccacagatctccaggggtagctgactgccagtgtcatgatactgtcattatctcttcatttaacatctcctctcagagtactcctggcttgctagtttaaattgtgaaaattttctgcattagcctcattttatttacattctttggtctttactgttcattactatttaaatgtgttaacatttaaatgacatctatactgtaattttcctttgtcactattgaagtcaccctggactgctaattgcaaacataatcgtattttcagagaggtttattttaggcagattgccccttaagttgcaggaagatggaaagaatggcaggcagatcaccaagaatactctgaagatgaagatgaataaagtgggtaagagtgactgggatgggcagggaatggcagacccctgaatgagttagggagtgatcgagcttgaatatttgtgccacccagatctcatattgaattgtaatccccaatgctggaggtggggcctgatggtgggtgtttgggtcatcagggtagatccctcatggcttggtgcagtctttgagatagtgagtgattgctcgtgaaatctggtcatttaaaagtgtgtggcacctcccacaccccagctcttgttcctgcttccaccaggtgagatgtcttgtccctctttgcctttggccatgagtaaaagctccctgcagcctccctagaagcagatactggcactatgcttcctgtacagcctgtagaaccaggagccaattaaacttcttttcttataaataacccaccctctggtattcttttagagcaatgcaagaacagcctaacacacggagaaaagccaaggcaaccgataggtaagaaagagccctctaagcagaagctatagccaatgcaaaagcactgaggtgggacagcaaaaaggccagtgtgtctgaaatggagggagggcgatcatggtaaaagtgaggccagttggagtggctcatgcagagcctggttggacaaggtaaagtctccgtagcatttgaattgtctggatttgccattcccaaactgggcaccaaagtgcccaaagcaccacattgccttggaatgttttcaaaagttgagggaaatccatcaattcttgacatctgttcattaccaggcaaactactggctcaaggtagttcatagattcaacattagattgtgctagtttccagctgggtgcagtggcacacgcctataatcgcagcactttgggaggctgaggctagcagatcacctgaggtcaggaattcaagaccagcctggccaacattgtgaaaccccatctctaccaaaaaaacacaaaaattagccaggcgtggtggcaggcacctgtaatcccagctactcaggaggccgaggcagggagaattgcttgaacctgggaggcagaggttgcagtgagctgagatcgtgccattgcactccagcctggcaacagagtgagacgccatctcaaaaaaaaaaaaaaagattgtgctactttggaagaagagatgaagagatgagttcacagctttgcaacgctgggtttccggggcttaccatgatgaaaagcatcagccaagtgtggcggtgcctgcctgtagtcctagctactttggaggcagaggcaggaggatcacttgagcccatgagttcgaggttgtagtgagcttatcgagacactgtactctggtctggggaacagaggaagaacctctctctaaaaaaaaaaaaaaaaaaaaaaaaaaagagcaagcaccaagctgaaatcaacacgggtcaagaaatgatagtgtggtatccaatctgatttcaaggttgaagaaatagtgacatgtccaacgggcacacacaccccattcgaaattatctgtgcttatttaagaataaaggaggactggccatggtggctcatgcctctaatcccagcactttgggaggccaaggcgggcggataatctgaggtgaggacagtcagcctggccaacatggtgaaagcccatctctactaaaaatacgaaagttagctgggagtggtggcaagcgcctgtagtcccagctactcgggatgctgaggcaggagaatcgcttgaacccaggaggcgggggttgcagggatcacaccattgcactctagcctgggagacagagggagactctgtttaaaaaagaaaaaagaaagaataaaagaaaacatttttatttccatcatatgtatttacgtatatatgtaaactgcttctttattattagaacacaaatacttatgttgtttggacatagctatttaataaacttaacagtttaggtttgggttttgtcctggagcacttgaaaaattattgagacactaaaggtgccatgaactgagaaagattgagaacttctggtctatacctttgatcagagctcacttttattaattctaaattccctttgcggactttgattcttttttttttttttttttttttttttggcagccttaagctttcccttgagaatgaaaatttaaaacttgtaaattttttgtacacccatgttcatagcagcattactcacaatagccaaaaggtggaagccatccgtgtccatcaatggatgaatggatacacaaaatgtggtatatacgtaccatggagtatttttcagtcttaaaaagggataaaattctcacaaccttgaaaacattatgctaagtgaaataagctaggcacaaaaggacaaatactgtataattccacttatatgaggtacccacggtagtcaaattcatagagacagaaagtgaaggccgggcacggtggctcatgcctgtaatcccagcactttgggaggctgaggcgggtagatcacctcaggtcgggtgtttgagaccagcctgaccaacgtggaaaaaccccgtctctactaaaaatacaaaataagccgggcatggtggctcatgcgtgtaatcccagctgctcgggaggctgaagcaggagaatcgcttgaacctcggaggcggaggttgtggtgagccgagatcacgccattgcactccagcctgggcaacaagaacaaaactctgtcttaaaaaaaaaagaaaaaacaaacaagaaagtgaaatggtggttgtcaggggctaggagagaggggaatggagagttagtgtttaaatggatgcagtgactcaatattggaagatgaagagatctggagatggaagttgatgatgactgcacaacaatgtgaacgtacttaatgttactgaactttacagttaagatggctaatatggtaaagttcatgttacgtatatttcaccataataaaaatacatttttgaaattcatggaccacactcatcactcctaaaacataaattaagattcccacctacagagggcgccattgacagtcctagtggcattcgggggttgggtgtgcaggacccacaactgcctgaagctccagccttctccttccccagccagctgcctgtgcaacagtcctcagcctcccccacctctccctcacccttctgagacttttgctgaggtttttgttttgcttgtttttttaaaactgctgccgatcaaggggaaacagactgggcatatccgtgactacccctctcttttcttccttctaggagagacaaagtcactagaaaagctaatgtggtacctacatacaacaagatatcattcaacctcaggaaggaaggatattctgacacatgctacaacaacagggatgcaccctgaggtcattatgctaagtgaaataagccaattaatcctgtatgattctgctgataggaggtacccagagaagtcaaatccataaagacagaagtagaatggtggctgccagggctggggagaggtggggatggggagttggtgtttaatgggtacagagtttcagtttagcaaaataaaaagagttctgtggatacggggtggtgatggctgcacaagaatgtgaatgtacttaatatcactgaactgtacacttagaaatggttaaaatgggccaggcacagtgcctcacacctgtaatcccagcactttgggaggctgaggcgggcagatctcttgaggtcagtagttcgagacgagcctggccaacatggtaaaaccctgtctctactaagaatacaaaaatcagctaggcatggtggcagcacctgtagtcccagctacccaggaggatgaggcaggaaaatcacttgaacccaggaggtggagggtgcagtgagcccagatcatgccactgcactccagcctgggctacaaagtgaaactctgtctcaaaaaaaaaaaaaaggttaaaatgataaattttatgttatgtatattttaccacaataaaaatatttatatataaatttgtgtatttatatatacatatatacttatgtatatttatatatgcatatataaaaatatctatattttaccactataaaatatttttaaaagaaaaatgattttttctttttggatgtgtgtgtgtgtgtgtgtgtgtgtgtgtgatatcaggtccttgaggacttgaaaagctcaaatcagatttggctggcatttcagaagaaagccaggcctccaaaactcaggtgtgtcacagagggctcagggacagggatgctgctgagcagaggaaaaggatgagggagtgagcctggcctaaggaggccaacagagtgggccagaggtggggagggaagagggtattcaaaaaccagggttgaggagagtgtcccagccagttcacaggaagaagaaaaaagttctggtggaaaagccattccagtatcccactagagcagcggtccccaccctttttggctccagtgaccagtttctttcattctcttttttttttttttttttttttttttggagatggagttttgttctgtcatccaggctggagtgcagtggcgtgatcttggctcactgcaacctctgcttcctgggtccaagcgattctccttcctcagcccaagtagctaggactacaggtgcctgccaccacacccagctaattttgtattttcagttttcacaacgttgcctaggctggtcttgaactcctagtctcaggtgatccatctgcctcggcctcccaaagtgccggaattacaggcatgagccactgtgccgaacatggggaccagttttgtgtaagacaatttttccaaagatgggggttggggggatggtttggggatgattcgagtgcattacatttattgtgcactttatttctgttattattacattgtaacatataatgaaataattacacaactaactataatgtagaattagtgggagccctgagcttgttttcctgcaactagatggtcccatctgggggtgatgggagacagtgacaggtcatcaggcattagattcttgtaaggagcatgcaacctagatccctcacatgtgcggttcacaaatagggttcacattcccatgtcactccttcactccagtcaaggaggcagaggccaggcagtaatgtgagccatggggagtggctgtaaatacagatgaagcttctctcacttctctcaccagtatggtggcccaaggctggagacccctgcactagaagatcagggctgctgtcactcaaaggaacaaggtggaaactgtttccacctaagagttcaaattaaaaccaaacacggtggctcacacctgtaatcccagcactttgggaggccaaggcaggtggatcacttgagctcaggagtttgagatcagcctgggcaacatagcgagatctcatctctactaaacatttttttaaaatattagccaggtgtggtggtgtacgcctgtggtcccagccactcaggaggctgaggcaggaggatcgcttgagcccggaaggctgagacagcagtgagctgtgattgtgccactgtactcgagcctgggcgacagagtgagtgagactgtctcaaaaacaaaaaaacaaaatttaaaaaataaattaaaaccaaacactatcttatacccaataaaaaataatatgcaaagtccataaaatgattatatttattgtcatggctacccatgtgcccatgtgtgaagcttctactctgactggctccttttttttttttttttttttttttttttttttttttgagatgaagcctccctctgttgcccagactggagtgcaatggcatggtcttggctcactgcaacttccgcctcgtaggttcaagcaattctcctgcctcagcctcccgagtaggtgggactacaggcacgcaccaccatgcccagctgatttttgtgtttttattagagacagagtttcaccatgttagccaggctggtctcaaactcctgacctcaggtgatccacctgcctcgacctcccaaagtgctgggattacaggcatgagccaccacacctggtcccgactggctcttcaggctctaaactccaccacaatccacaacacaagtaccagtcatggcagagatgggatttgcatctttgagctctgaccacagagcccacaccaataacgactgccctaaagcgtgaccaggcaagcttggtttagcagaaccagagctgctgctttccaacgttctagggagtttccttcctttagcacactttccttaatgatggcagagcactaggttggaagagtgcctggtgcccggaaggaagggaagagcagtaaggagggtggagagagggagtaggggtttctgccctttgttcccagctacagcccaggctggcccggctccctgtagcatttgctgaaggcagcagatcactggcacctcaggccttctgttgaaagcagcaccttcctgcctccctcgatggggaaaaaggcacctgctttctccaggatgaaatccatggtgtcccccagaaactgagtgtgccacttagaacacttgggaattcccacactgaaaaattccctttttttttttttggagactgagtcttgccctgtcacccaggctggagtacaatgacacgatctcagctcactgcaatctccacctcccaggttcaagcgattctccttcctcagcctcccaagtagctggaactacaggtgcatgcaactatgcctggctaattttaatttttgtatttttttgtacagatggggtttcccaatgtcggccagtctggtcttgaactcctgacctcaagtgatcctcccgccttggcctaaaagtgctgggattacaggcctgatacccactgcactcggccttgaaaatttcccatggatctgaattcagtccttcacaacgcttcaaaaacttccaagagtttgcacgtgctgcattcttcttttacaaagacaatgattcacatataaactgatagcatatgcaaaaggtgagaatacataattaagaaaacactcaggaatgaaaagaatcagtatagatttagcctgatttttttgaaatcctacatctattttaaataggttatgggtttttagagtcaaaatggattttagcattcatttttttcattttgcaaatgtgaaaaagtgagagacaggcgagtcaagtgcctctgtgggttcctctgtctcagtggcagagctgggacttgacctgaggtctcctgagtggctatttgaatataggttgacactattggatgagatgcctttgacctcggatgggctgtcagtacagacatcagttgactgctgtgcacatattcttaaagacctccttctggccgggcacagtagctcatgcctgtaatcccagactttgggaggccgaggcgggcagatcaggaggtcaggagttagagaccagcctgaccaacatggtgaaaccgtatctctactaaaaatataaaaattagctgggcatggtggcacatgcctgtaaccccagctactaaggaggctgaggcaagagaatcacttgaacccagaaggtggaggttgcagtgagccgagatcgcaccactgcactccagcctgggtgacagagcgagactccatctcaaaaaacaaaacaaaacaaaaacctccttctgcaggctttggggccacaccttcccacacaacttttctagtgcactgtggcttttgcagttctgaccaagcaggctccttgctattgatgcggctctgtggtgccagctctagaaacaaactaccatttgttgctttctaaaaaaaagccttttaagctccagacgacattgggcctctctctcctgagctgaaaggttggtttctttgaggtttccaaatggcagcttatgtcttctcagaagggctacagcccatttgttggaagccaaaaaccttacctcaatggcccaggtgagaggacatggctcagggttgcagtctgagtgtgaagcacataaacatctcccataataggcttggtggctgggcctggtggctcaagcctgtaatcacggcactatgggaggccgaggtgggtggatcacctgaggtcaggagttcaagaccggcccagccaacaaggtgaaaccctgtcgctactaaaaatacaaaagaaaaagaagaagaagaaaaaaaatttgctgggtgtggtggtgcacacctgtcatcccagctacttgggaggctaagtcaggagaatcacttgaacccaggaggcggagatatcagtgagccaagatcgtgccactgcactccagcttgggcaacagagcaagactccacctaaagaaaaaataaataggcttggatatggcagagggtgagagacaagtagctaggatctcaaggaagaaggaaaatagagatgtaacatggagctgaaaagaaggtgcaggaattgctttaaaagaaaacaaagagacagaaagtaagacgtgtaatttacaatgtcctgtaaaggttgcctcttgcacacatggactgaatgctgtgactacagaggcacttttcaaactagtacaagaaggaacaagattgcccaatggtgccatcacttagaaaagaaccctttattttacctccacctaattgctgtgcctttgcagtataagagggcttcaagtcttggttcggacggtcagtatgactctgtgccctcagtctccccatctgagaaatgaagattcctgttgtacctgggccagcttcatatgacctgagcaatcactcagggccctgtgttcaaagcattaaactatgcttggtttaatgctctgctattatcatcctggaattcttaataatccttgaacgaggggccccacattttcgttttgcactgggcaagtaaatgacgtagttagcctagttagtacctatctcaaagggttgttgtgagtattaatattttggaaacactttattatttggcacaccagtcatcattcactttaattccagctcccataactgtgttgaaataccaagtggctatgactgtttttattattcaaattccatcatagtagaaagcatttaaggaaaactgcctcggtggaaaagattatttctctccagaccccagattgattttacactgttcatccctctttgaaacatatattccttttcccacttttccgtcctatgagttgttatagtgcctcagagttaaggtatttgacctacaaagctcttagaaaagtgtggggtccagagagaaagataactgagcaattcagttttctcgcaagattccaaaattcttaaagagatcagattaggaccaaaatcttctgatttaacagtgaggggctaagggacaaaacagagggaagccagggagacgtccttcagaccctctcatagcccacgactgcccggtcgcattgtgctgtccatctgccttctaaacatccttccattgtggccgcttctcctcttctttctgggtgtacagcgagcacatcagcccaagcacagccataaacccctgactgcactctctccctcaccacggccatctccccagacccacttttcttttttgagacggagtctcgctctgtcttgcccaggctggagtgcagtggtgcaaccttggctcactgcagcctctgcctcccgggttcaagcaatactcctgcctcagcctcccgagtaggtgggactacaagcgtgtgccgccatacctggctaatattgtatttttagtagagatggggtttcaccgtgtgggtcaggctggtcttgaactcctgacctcaggtgatccacccacctcggcctcccaaagtgctgggattacaggcaccagccactgcagccggccacatgccatatattgtttatccattcatccactgaggttcttccatctgtcagctcttctaaataatgctgcaaggaatattggtgcataagtatctgtttgagtctgtctctgcttttagttatttggcacacatacttccagggcctgcttttgactcctccagtccatttgcactcagcagccgagaaggactttttaccaacacacatccaatcacatcacttttgtacttacagttctttgctggcttaagataaaagacggaaattctcaccaaagtctccagggccctgagctctggcctgcctacctccaagtcccctggctcttccctttgctctgctccagctgtctagacttttccccatccttcaagacagccatgctccttttggatttcaacatgctggtccctttttctaaaatgttcatcctcccgcaacacccgggttttgctagtttttgcttggccaattcatcctctagctttctcatccatcttgccttaaaatgctcctgaatatctcccttcctccctcgggctcagctccttcattcctcgcttctgctcccatggttcctgtctttcgtgactgtccgttcacggggcattattttccaatgtctgtcttccctgctgtaatagtaactgtatgcattcatccactggagttgcttccatcttttggccatcataaataatgctgcaatgaatattggtgtgtaagtatgtttgagtttctgctttaccaggtaagaaagcctggggatgctgtcacagtgagtaacagtgcccacttagacatttggaagccagtgcagacccacagggcagtgctgcccactcccaggactcgggagcatggctgcctccctgtgccaacactgtcagtcactagcgcagaacctggcacacgttggtaccaattcatatctaaactggatgaatgaacagacagaatggaaagtacaggagggacccgagttttggacaaacattacttaccctgtggctcctaagtgctgggcatccttacccacactcccagcttcagtttccctaacctagagagcgcacactaatatttatgttcaaatgttattggggaggttgagtttttatttaatatttgaatgtagattttaaaaatcattatgccagacaggctgggcctcactcgataaacactgatgtttagcatttaacacacttttccccagactggaagaagaggccgagatcccaattcggtgacccagcccttgctggagtactaggtggtatctaatgccatccacccttccgggatctttacggcccacctctgagtgggtcccacggggaccctcagccgcattttctttctgcaggcctccctgcacactctggggcgttcgcagctctggagcccgcggggcagtgcgtccggccccgccctgggcctcattatctacgtttccgcgtcacgcccgccgcgaacttggcaggccctcccgccgggttcgggaacactgtgtgcctagcgcccgccctcctcccttccgccggccccgcgcgatccatagggtttgggtcgctgggcgccaggtacccgcacccggcaagcagccacggagcccctcgcgcacttgtcctcgatacccttgagttggggctacgcaggccactcctaggccactggctgggcgtccgaacgtgggtcaccccgcgcacagtctagaggttcagaaagatgctgtggcccactttaaaacaaagcccaattattagcgctcggcggctgtttgcgccggtgcagtgtcagatcccccagcgctgcggacaaccagcacccaaaggaagccgagctggagctaaagatcccggctccggagccatctgaccggttttgagacctccagctcgtcgccgtcctggctgcgagagcttgggcacggcgccggggctcagtctcctcttctgtggaatggcgataactgtatgtgccgggtgactgcacgtggcgcgcggcgggtggcggggatggcagcggtgcgatcccacgcctccaggaccccaccttcctgcggcccccgatcggccccgccccgggggcgccccagctgcacgcgcggcgctggctccaaagtgcgtcacgggcaccggccgcgctccttctgccgccagggcgaggctggcacccggccagcgcgggcagggccacgggtgcccggctgtttcccgggtgtggaaggcgctcaaggtgcgcggcccggggcgcgctactgggggcgccctccgcggtgggcagcgcgccagggatcggcctgggcagccgcggggcgcgcgaaggctgcgctttccctacggcccccctcgcttcctccggcacggcggcaacggagatttcctctcggggaaactacgcggatccttttcggggatcctcgccccgccccagttctccgccccctcccctttgctggggcgcctgggctggcccgcgcaggggaggaggctctggcagcctgggcagggaggcggcggggggccgcggagccgctggccatcgattctccccgccatgtgacgccgtccttagccctgcgacccccagcgcgtcccgggcctgcgcctccgccccgccgcgcagcgcacgatgcttctgccgggacgcgcacgccaaccgccgacgccccagcccgtgcagcatcccggcctccgccggcaggtagagccgccggggcagctcctgcgcctcttctactgcactgtcctggtctgctccaaagagatctcagcgctcaccgacttctctggtaagagcgccctccctggctgtgtgcccccggcaccgcggagcgcccaggtgaaccctcgactgggggcagccgcaccagtggacacggcggggtaggattaaagttgaggcgtgctcacagacacttgtctggtgtgagcccttggcatatagatggctgcgagtgaagtggcgacgggggactgccactcccaagaaggaagggtgtgtaatgtattcagagtttctcgccctgctgttgacctcgtcaatttcctagcattagggacctggtcctgagccacgctcgttctatggaggctccttaaactgagccctgtgccgcgcccagcgctgtaaaatacacgtgttgtggtcggaggcgttgcgccgcgtttgtcacccgcgtagcccgtttgcccatgtaaggagactagcccaggggacacttgacctcgagtccacattggcaggtagaaagggaagcccgcggggactggaggtctggtggaaaggcagtgagggatgaggagatacttagataagagagaggagcctctctgccaaagtgtaccagggtcctccctctccaattccagtttccttcacagaaaataatgacttcctactctcgaataaactaggaggcttttctttttgggaatcgtgatccaggctctcgcagcggatctcagatagttctgagcttacaggtgtgacgccccaaagtgaaagggatttctaggttgacgatagccataggagcacatgcttaagttagcgctgcagttgcttaaggtaacacatgtccttgccgctgaagcacacctggatctccctctggcaaggctggaggccttcagccttccccagcccagcttagggagcagctctgagccccatactcctccttctccagggatcttctgccaagttcaggctttgcacagtcggtccctatcgggtcctcagtgcagagtcttttgcaacataatggtggtaaagggagtcctcctcagtcctgtttgtgcagtaggctagtacatagcaaagaacaagggcaaaccagaagttgagatggggttctagtttacttacagagaatgtcattgttagtggagagcccttaggtcagaggttctttgctttgaatatgtaatatcaaggcagtattcctacctagcaaaggaagccaagataaggcctatttggcaagccacccacggcccttaaaatcaagcatcccaggatcagaactctgtggtaagagttgtggggaaatgcatcagacttttcaagggctattaacttttttttttgtactactagaactttcttggctgctagaaaagctctgtattagctgatttgagctatggaaagcagttctgagttcagccaccatctagctctgaattctaaggaaataattgaaaactgacaagcctttttgtgtttgtgacatcattgcaactgaacaaatattgctttaggcaaattgcagtgtaaccattagattgttttcacagattatagacacttagagttctgttgctttagggaagcagttgcaatacttgtaacagtctatagattaccacccaagtttggaattgtctgtatctagcaactgttacatacagtggagttgagctatcaactccttagtaaaatgaatgatttgatacatgttattctaaatagtataaatgataaaaggcattttcttctgctttccatacgaacctaaattccagggtttcaaactccctgagccagcagtaggtggtgatattgccacccacaacgagcccccatttttcctctcatcagtgatgctctccagagatctgaagattaggcagaacatgtcagaagccttttggggagaagaaaggaaatataatgtcctcccaaaccactgatgcacttaaatttaaaccttaattctatatcatgtgaggtcagggaaatattagaaaaatctcagggagaaagaaagatcatcttccaaagttggctcatttgacttggattttagccgccctccctctgcaaattcctaagctccaaagatgaccatcttattgttcggttcagtgtttcagctgacgcgaaccccatgtggcctcaaagcttgccgcctgtgttcctgggacagtcggtcctgttcctttttatgaacttgaaggagtgcatagaaaccaaaactgaggcctggaaggagacagtggatcctcccctgcagagcctgatcacaataaccagggctagagagcagtgtttgacaatgcagatacttgcctgtttttctaaataaagggaacatcaaaaactagcagaggatagaggaaacttgggatccctctgccctgtgaaggaggagggaggatggtgtatccatgtgaaagaaagtgccagaatgtcaggggtcccagccattgtctgtacaatataggcccctttctccccccaggagattagcagtgcagagttttggaaagttccttaagcctttctcttctttgcggctcttccttgagccttttcctggggctgtcagctggtgtcgttttcctgggtcattgatttttttttgccctcagggattccagcatcgatctcactcttaataagccagaggcagcatcatggccccctcctcctccctgtccatgctcgtgacttgttctaatcacctccaagcttgctagtaaacaggctccccaaacaccgccttctctctcatctccaaagattttgagatgtcgccagcggccactggaaggctatcatcactgcattaaaaatgaatcccagcgaaggcaagagaagttcatgcaaaattagtgcctctgatccttaatctcatactcaaatgtgcttggctttcatccactttcctctttgggatagagttctcttcatttgactgcattctcaaattgaggatttggcttgagacgtctaaattcatcattgacttaaaaaacaaaacaaaccccagaagtataatgctatgcccatagttctttgttcagagaacaagacagggagctggagcttgaggatgagtgctgagaggagggaggggtgccctcttgagtagcagccataaaaagcaagggatcctcatatttttgccttaaagagtggtgtttcagtgtgtctcttgtatttagtttgtgatggtccctcagtacttactgttttgtgtgtgtgtgtgtgtgtgtgcttctaatttgtgttgtttctctgctgaaggtaagctgggtcttctctttcctccctgcttctttcctttctctccttttctttttctttttctttttttttttttttttttctttttgagacgcagtttcactctgttgcccaggctggagtgcagtggtacagtctcggctcactgcaacctctgcctcccaggttcaagcaactctcctgcctcagcctcctgagtagctgggattatgggcacccaccaccacacccagctaatttttgtatttttagtagagacatgttttcaccattttggccaggctggtctcgaactcctgacctcaagtgatccacccaccttggcctcccaatgtgctgggattataggcatgagccaccgcacccagcctctccttttctttttcttttgtttccttttttctccaagaagttcaaagtgattgatgggcttctaggtagaggtggggaggaaggaagggaaggaaagggtagaaagttgttctagttcccacttgaattcctcaagaactcccacccttggacaaagtagacatgaccaaatgtttccacatttgattttgtcctagggcacatagtggtgaatgtgagaagtagaagggacaggggatgggaaacaaggagagtggggcagtctttaaggccttccttgtacccaaatgtccccagacctcaaacaaaggtcactctataatagaagtgttgttgttgttttttaatggagtcatgctctgctgcccaggcccgagtgcagtggctatttgcaggtgcagttatagtgcactgcagcctcaaactcatggccttaaccgatcctcctcccttagcctcctgagtagctaggattacaggtgtgcaccaccccacctggcctgggccagtgttccagtccctgccattggtagcccaagtgagcattaagtggtacttggtaccagattgtattaatttgctagggctgccataacagtgtactacagactgggtggcttacacaaggaacatttattttatcacagttctggaggctagaagttcaagatcaaggtcttggcagagttgatttcttgtgaggcctgtctccttggcttgtaaatggcatctccctgctgtatcttcacatggtcttccctccatgtgtgtctgtgtcctaacctcctcttcttacaaggatatcagtcatattggactagactccttcaaatgatctcattttcatgtagtcacctatttaaaggccctgtctccaaatactatcatagtctgaagtgctagagattagactccaatgtttgaattttagtgggatgcagttcagccaaaacttagatcatttgcagcccaataaataaacctgactgatagctctttatttcactggccaggaattccagggtatagaaatatggtaattcaattgatcccgggggccttgaggtgggaactcagtattgatggacacagttgttcattttggagaggttgaaccctgttatttgctttcagataagcattgggtctcagtcctggcagcacaataaaatctcctggggagactaaaaaaatatctatggacattcaggctgcaccccaagacttctgatgtaattggccctgggagagccagtcactgatctctttttgaaagctccccaggcaattctaatatgcagctagagttgaggacacctctggagttcagaggggagggtgaccttctgcccatgcatcaggtcatccaagggcacagagtgtggctgggtgtccccttcaccccctaccctagggctcatcaccagggagaccaggactgtatttccccagcatatcagcacctcgcaacacagacacctgtgcatgcacagccatgcaaacacacgcatgcacacacccttccctctgcatttcatgatgcctcagtcacatcatcctttttattcaagatttatctttactttaaaaaaatttatggagtgaaaagccagctcgtaactaaagaaaaacaaaccaaatgtccgaaggagttgtctagaggccacagaagaagagagatgaatagccagtgtctgaatctgctcatctgtttccatggaaagtgactacatctgaaaagttttctgccggctctttttatggcagagaagagtctcggcccacaagtggtccctgttattgatggctttggtctcccaggtgctttattggaaaggggagcctagcagcagtttcagggaagaaacagaaaggaagagggtaaaagttaattgaactcagttttatctgatttcatcctcgtagcaactctgtgagatcaggaccagtctcatttgcagatgagaactcagcctcagagagggtaacaaagttgcccaagaccacccagctagggagcagagctgaggcaggctccagcaccagggctggccagagtacagggatggggccaggctggggacttcgcctgcaagggtgttgggggtagggaggagcaaggccagaaaaaaaaagtaccacaatttgcctaacctttcttgaaagttcatggggtcattgctgccattttggttaccttctgaatagactgaccttttcctaccctcccatcagcatcatttcatcacagtccttccaaagtgggtgcactcacaaagtggtccagtggggtaggaaaaacatgtcagaacttctgttcttgcctattggttttccatcttaataaaaaaaggagttaagttttgcttataattaacatataaattgacagaacaacatgtaatttataaataagtgtgcatatattggagatgtgttctcaaaatgtttctgttcataatgttttttataattgtttctgccagtaataataattattttttaaaacttttattttaggtttgggggtgcatgggaaggtttgttgcgtagatgagttcatgagttaaaaaaatttggaggtcactgatcttcacagccatcctgttggcttaatatctttaaaattcttagtgaggcaccactttgagggtaatgtactatgagagaacaattgctccctcgttacccacccctattgcctgacttgcgtactgctctccccagctccacagctgctaataaaatttagaagcaggatttgaacccagtacctattgggttttaaatatccatactgatggccgggcactgtggctcacgcctgtaatcccaacactttgggaggccgaggcaggtgaatcatttgaggtcaggagtttgagaccagcctggccaaaatggtgaaaccccatctgtactaaaaatacaaaaattagctgggcatagtggcatgctcctgtaatcccagctactcgggagactgaggcaggagaatcacttgaacccaggaggtgaaggttgcagtgagccgaaatcgtgcttctgcacttcagcctgggtgacagagcgagttcctgtaaaaacaaaaacaaacaaaaaacaaaaacaaacaaacaaacaaaaaaacatactgtcactgaagctgagcaatggaccaagaaggtgggagcgggggtgggggctggggggaggtctgaagttttatgatactttgtcactattttaatgaggctggtatatttgtatccttctgtaaggaaatggtttctcataataacataaatcctaaatcctacagtcatgaagattttagtactggaaaaagaatcttgggttggaaaggcagctgaccaagtgattctggtgtcttctgagtttccccttgccccttggggtatctcgttctgccacccctttagttggctcccatgtgtgcaccaccggctcagcagaggcagtaacttctttacttggtttccctcagtatgagtaaaaaagttggtgagttaaaaatacttttagggttttaaaaaatttttacagcctggcccatagggtgaaacctgtctctacttaaaatacaaaaattagccaggcatggtggtgggcgcctgtaatcccagccactcgggaggctgaggcaggagaattgcttgagcctgggaagcggaggttgcagtgagccaagatcatgccaccacactccagcctgggcaatagagcgagaccctgtctcaagaaaaaagaaaaaaaattatcttttacttttgagatagggtcttgctctgtcacccaggctggaatacagtggtgcaatcacggctcactgcagcctcaacctctggggctcaagccatcctcccacctcagcactccctagtagttgggactatagtcacatgccagcaggcctagctaattttttttggcattttttttttgtagagacagggtctcactatgttgcccaggctggtctcaaactcctggactcaagagagccacccgccctggcctcccaaagtgctgggattacaggagtgagccactgtgcctggccctaaaaataatttattaagcacataaagcactctatgccagacactgttcaaagaacttcatgttaactcatttaatcctcccagttgtagctataaaggagatgctagtataaaaagttcaagaaactgaggcaaagagcaatttagtaacttttggggatttgaatccaggtagcctttctaataccaagggaataaaacaaaataaattacatgcagtttaaagcagtggcacttctgtcatgtttatctcttcatttcctagagccaaatctttcccaggacttacataagtaatgtccattccttgtcctgtttaaagatagtaccatctagcctcaaagaactgattatagaattgggtctgtaatttgtttctggaaattggtgttctgaaactatttccccaacaaaacacctagaaatgctgaataaaatataagaaaaatcttttaatgtataaatgagtggtgaggaaacaaaaatgaagagagaatagagaactagggatgatagctggtgctaaccctatggctacgttggagttgcttgatggtcttgacaacgaagatttaacaggtgcctgagcgcaggcgataaggagtgagaccactgtatagtgaggaattagaataaagacctctatataaagccaggactttgaaaacctaagccttcattaaaaggtggatgtaaaacaaatcagccttcttgtaaagaaagatgacaaggaaacttgtcatagcctaggttcaggattggagaaaaaaataatgtctcttgagatggtgtaatcaaaattctgccttttggagagtctgggttttgaattcatattacctttactgggaaacccaagttgagaaactaataaagttgtcccatgatacctggcaaaaacaaacacacagatactgccttcatgggaatatcatcaatataggcccatctatagattcctatagctaaaatgctgctgattatgatcacacaattcaaaattacattatatgagcagtagtcagcagcaatgacacggttcttaagtaataaaagagagaatctaggtctgggcatggtggctcatgcctgtaatcccagcactttgggaggccgacgtgggtggatcacctgaggtcaggagttcaagaccagcctggccaacatggcgaagccctgtctctactaaaaaatacaaaaattagctgggtgtggtggcgggtgcctgtaatcccagctagttggaaggctgcgacatgagaatcactggaacctgggaggtggaggttgcagtgagctgagactgtgccactgcactccagcctgggcaacagagcaagaccctgtctcaaaaaaaaaaaaaaaaaaagagggaatctaaaaagaaatttaagaaggaatctaaaacatgagaaaggaacaaaaggctatcgagaaaaaacaggtgtatttgtaaaagaatcaaagatatctactaacatgaaaaatatattcattgacatgaaaagcctgatgggtaggttgaagagcagattaggtatagctgaagagagaaacagtgaggtggaaaaaaaagctggagaaattatccggaatgaagcaaaacaggtaaacatatggaaaacatggaagaaaagtcataagacatggaggatggaatgatggttgaatatacatctgatcagtattccagaaaaagaaagtagggaaaaggagagagaggcaacactcaaagtgatggtgtcctaggattaatttttaaggattgatgaaagattcagagttaagcattccaaggaagataaataaaataaatttatacctgaatgtgtcatactgaaactgtaaaatactaaagacaaagtgacagtcttaaaagcaatcagatagtaaaggaaatgttatctataaagtctttgctacaaaaacagtgggagccatagacagcgaaataatattttccaggttctgagaaacaaacaaacaaaaaacaaccatcagtcctgaattatatacccagcttaactgcttttcaagagtgtgtgaaggaaagacaaatttaccgctaatgaatctttactaaaagaactattaaaggggtcaggtgcagtggctcacatctgtaatcccagcactttggaaggccgaggcagatcacttgaggtcaggagttcgggaccagcctggccaacttggtgaaaccatgtctgtactaaaaatacaaaaattagctgggcatggtggtgcacatctgtaatcccagctactcacgaggctgaggcaggagaatcgcttgaacatgggaggtggaagttgcagtgagccaagatcatgccactgcactccagcctgggcagcagagtgagactctgtctcaaaaaaaaaaaaaaaaaaaaaaaaaatggtggacaaagaaatggtacaactttgaatgcactttatccacattccttgctctgtcttcctgctgagggagtataatctttttgtattgagagggatgttctgtaatatatttcactcttttgatagcaaaagtcatgagacactttcttgacccacttgagctcttccaaggactataacttccaccctgagatactcaaggctcctccacaggtgagcctcagtttcatggtgaccacacactagaaattctgtagggaagaatgggaaacagtctaaagcctctcaggtaccagatgctgtgctagatatggtacaacctactccaaaaaatcattccttccctggggaagcttgcttcttagtgggttcatggacacacacattacagaggagtttgagggatgagcaatcgatttggcaggtcacattctccaaaaactagtaagcaaaccacagagcttggaactgagtgtttggaagtatgttcacagacctactagatgactctggctatgcatagattttacatttccttacatgaatttctcatccttatgttctctccgacacctgtatcatttgctcactcaagcctctggaaatgaatttctcctgcactaacaagttagagaatgaaatgatgcttggatgaagtgatgcttagggttcgtttcaatctgagagccaagttttccacacgcagaaaaccaggcaacattaaaattcaaaactcaggccacggagtctgaaatgtatgtttgtgaacagtctgatttcatgtctgcctctgatgccctgtgaatacaaatcacctcatctggggctggaggagcagagaggaagaaacctaagaatgatctccaaaacaaatctttaattcggatgagtataatagagtgtaatcccatttcaagtctgtcagcattcctttgatgattacaaatgagtcccttttcccctgcaatgtgggggaataatctggataaaataatcctttttgtctgcaaaggcccatgcgatgcgtactcgtgacagctttcagagtagtgtttcagagtctgagagaagagcacactgtcctaccaagttatctcctttctttctcttgacttagaagatttttcactcttttcatgttcagtggcttccgaaattctcaggcttagaaatcataaatcatcgtactgtactgaggaacaagagaaacccaggtcaccagctccttttccctccctgcctgctcaacaggagatgacaggtggaaatgggaatgtatgatcttatctagaagtccaatttgtacagctttggagggatatacttgaagaaattcacataattttacagtctctttttcattaaaaaaaatgtacactgaacccaagttcaggcttacatgcctccctttgtcaatttccttgtaaaattaagggattgtcattttaaacacttcattctattatctgaaacctgaatgccagaacgctccttccaaagctaatgatgcaaaatgttttgtggacaggccaccctggacacaaagactcagaatgaaaagaggtcttgagaaccccagtgctgtggtcccgctctgtggaactggtcacggcaggctgtggagaaccacacagagcagatcttgtggtcttgcttgttccactttcaagtgcaaaggtccctctcatctgatttccgtattttttttattttaagttagaatgtcccaagatgatgatgatgacgtgatgatgatgatgattgatgatgatttctcatagagtctcattctgttacccaggctggagtgcactggcatgattgtgactcactgcagcctcaacctcctgggctcaacagctcctcctgcctcagcctcccaggtagctgggactacacaccccgctaatttttaaaagtattttgtagggtgggtgcagtggctcacacctgtaatcccagcactgtgggaggctgaggtgggcagatcacctgaggtcaggagtttgagatcagcctggcaaacatggtgaaatcccatctctactaaaaacaaacaaacaaacaaacaacaacaacaaaaattagttgggtgtggtggcatgcccctgtaaatcccagctactcaggaggctgaggtaggagaatcgcttgaacccaggaggcggaggttatagtgagccgagatcacgccactgcaccgcagcctgggagacagagtaagactccatctcaaaaaaaaaaaaaaaaaaaaagagtattttgtagagacagggtcttgctagattgcccaggctggtctcaaactcctagccttgagcgattctcctgtctcagcctcccaaagtgctgggattacagataggagccactgtgcctggcccaggattattttttattagtgttagagctctcaaaaaccataaactaaggctttgaggcaaaaggtcttttcttgtctcagatttctgtgtctctccctggctattcaagtcaaggcaggttatttgggtttgtcaacatttgccaaaaatgctatatgctctttacaggggacggcgatctttacccagtgaacattttgcttttcctgatatttagttgaaaccagtgattctcagtccaagagtgattttgtcccttgggaatatctggcaatctctggaggcaattttctttgtcacagcctcttagtgagtagaagccagggacaccgctaaacatctgacactgtccaggacagcgcccccacagcaaagaatcatgcagtccttgtgctaaggttgaggaaccctgggctagaccagcagatttgtccttgttttattttccacacttttagaacctgaaaaaagtgaacactttttttttttaaatcagagttgagtctggagtccctagacagctctgaaagactctcttctccaaatctagcttgccttctgcagcccgaaggaggtcttcagttccataaagccaaagaaatgaaaatccactggctgctgtgcttctccaccctctctagcccagtggggttttagtcagaatttttcccccttcctttcctccaaggaccttgtctatgtgtttggcccttttgccttcatctcaagctagactcttggccatcattaacgtcaaagtgaaatattgctctggagaggtgttcagacttgaagtcacttgctcacttgacgtgcgaggatgtgtttgcaacacatctcaattatttcaaaatctcagtgaaatggttgcatgatggggggtggataatttgatttgaacatgaaaaaggaaggagaaagtcacgaagatagtgcagagattttttttttttggcatctcccactgcctccccgactttcctccttccctgtgttcctgctctcattccccctacctctctctctccaacccctgccaccccaccagcctccatgcactcacatacagacagcttgggtgttactttgtgaacagtgcattcagcagtctgtgctgctgttatacacttatcaagatacgctggagtttgtgtggtcatggggctaagcatcgttttacagcccacatcgagaaggaggagtcgacggactcctctgaaatggtaactaccatccctgcccagaggcctcaagactgcagagcagcttccactttctgagcatgcctccctccatcaccccttcagacaagtcacaactctacttaaaatatttttttccttctgccaaacacagggaaaatatagtattgtttccaagagagcgagcaggggcaccagcaggaatgggtgtgcagtatttgtacagttttgtgactcagtccatctgaatttccaagcattttaagagctttgtcccaaaaaaaggtctattgtgtggctcttggcactgaagaaaatagcaggcctgtcagaactctgtttcagatttaattttcaagtgggtgatgtacgaatgctgtccaacgggagggcattttctcattcctgctcactttggtgccatagaacttcagttttcagaatcagctcagattaaaaaactgaagcatcttttccctggacacccttttaataaaaaggcaccatgttcttaagcaaggattactgtggctcttaaatgaatatggcttcctgcaataaaagtaaaaacatttgacgatgtatataatacatttgttttttcagagcatcttcttgcaagactttactattctttgtttctatatagtttggaaacgcaggcctaaagacattattgatcttctcaaatgcctcttgaatggagtatttaccgctgggtatagacagtgttaaaaataggcagaggccgggcgtggtggctcatgcttgtaatcccagcactttgggaggctgaggcggaaagatcacgaggtcaagaggttgagatcatcctggccaatgtggtaaaaccccatctctactaaaaatacaaaaattagctgggcgtggtggcacatgcctgtagtcccagttactcgggaggctgaggcaggagaatcgcttgaacctgggaggcggaggttgcagtgagccgatatcgtgccactgcactccagcctggtgacagagcaagtctccatctcaggggaaaaaaaaaaataggcagaggccaggcacagtggctcatacctataatctcagcactgtgggaggccaaggtgggaggatgacttgaaggcaggagtttgagacaagcctgggcaacatagcaggactccatctctattaaaaaaaaaaaaaaaaaaaaaagaaaggcaggaaaaacttgtttttgaagtttctcttttcctagttgttttcttccctggaccttaaacagtggacagtgacttttctcattacatgtatactttatgtagagtgcacagtttgtcctccatgtcccttgtcttctcttgttgataaagattgtgtactatatatttttaaaaaagaactgaagcatcgtatctgacccctggatccctctgaactgtgaatagatgataaacttctgggctcagaaattttcccataatgttgccaagcattagtccagcgtggaggcgactttctgctcaaaccactcatttgggtcccgcgcccaacgtcacccatcctcagcaaaacaacctttatttccttcttcctggtttccagaaagttcccttaaagccctgaggaatcaccgaatgaaaggggctttttacaaacaggaagcttaagtggagtgccagtacacaacatggattgcaccaggctgggtctaagataaaaccagactgtggacaacgggacagataaggcccacatggctctgcactgcctgggtctgttactgtgtggaggaatgtcttagtctgttgctcctgtgggtgtagctaaaacacgaaccaggagccttcatccttagaaaggagtcagacagacacctgagaaccaatcccaaactgcacccttcccctgaacctcgtggaaccttctggaatgcaacttattactgccagagggtctttgatgagagtctactctccactatttgtcttcattacccacatattctctttccgtggaaaggtaagttattagagtttatgcagtctggtatattaactgagagctttactttaaagaatgtcatgtttacgattcagtctcacagactgggttaaaaaggcagtgttgactattaagttgtaaattactataatgatcattattattattcaagcaagctgtgaggaatgagcattatctcacaatatctgcattttagtgaacctgagggaagagtgtatttgctggaattacagaagcctgagaaccacaggggaattctcactgcagggcattcagggtccaaggctgattctattttgcatgctcaatccttcctcaatttatttttatttatttatttatttattttttgagacagggtctcgctctgtcgcccagagcgagattgtcgccttggtgcaatctcagctcacggcaacctcgcctcccgggtttaagtgattctccttcacttaaccttcacttaacccagcctcccaagtagctgggatttcaggcacccaccacaaagcacagctaatttttgtatttttagtatagacgggatttcaccatgttggctaggcaggtcttgaactcctgacctcaggtaatcctcctgcctcggcctcccaaagtgctgggatttcaggcgtgagccaccgtgcctggccctcaattttatttttctatttatttatttagagatggatttttgctcttgtcccccaggctggagtgcagtggtgtgatctcggctcactgctacttctgcctccaggattcaagtgattctcctgcctcagcctcctgagtagctgggattatagtcacgcacccctacacccagctaatttttgtatttttagtagagacagggtttcaccatgttggccaggcaggtctcaaactcctgacctcaggtaattcacctgcctcggcctcccaaaatgctgagattacaggtatgagtcactacacctggcccctcaatttaattttaataaaattatcagggaaataagccacaaaaggacaatgtgcagactttagaacagagctgtccaatagaaatataatgtaatccacatgtgtaatattaaataatttagtcaccacattagaaaaagtaaaaggggtgaaatgaattctcctagtaaatttatttaaccaatatattcaaaatattattatttcaacattaatgaatacttaaaaattcttaatgagatattttatgttctcttttttttgcttatgaaggcttggaaatctagtgtatattttacactaacagcatatctccattgagatggccacatctcaagtgcccagtagccatgtgtggcctgaggccacgactctgggcagtacagctttaggtgagactagggcagggcagaggggggcacctgggatcaggcgtggagcttggggccttgtttagcaccctttggtgagggcactttctttccataaaacccaggtcaagcatgcctcacaaaggggccagtggaggtgcctcagtttacatgggagcttggcctctccagcttgccttcttactgcctggaagaagactggtgccctctcgccttctctagcccctttcccaagaaccctcccagaatttagtcctgtgaagggccaggggtgcaaggagtcacccacataatgacaggacccgccagcaataccagaagttggccagccctactcatccaaattcctttctgcagctggacatcacaagggtttcagactgccatcctgtggcaactccattttggggtccggggatgtaagggttattgtattagtccattctcactctgctaataaagacatacctgagactgggtaatttgtaaagaaaaagaggtttaatggactcacagatccacgtgactggggaggcctcatgattatagcagaaggtgtaggaggagcaaagtcacatcttacatggcagcaggcaagagagcttgtgcaggggagctcccctttataaaaccattagatcaggcagggcacagtggctcacacctctaatcacagcactttgggaagccaaggcgggtggatcacctgagatcaggagtttgagactagcctggccaacatgttgaaaccccatctctaataaaaatacaaaaattagccaggcgtgatggctcatgcctgttgtcccagattctcgggaggctgaggcacgaaaattgcttaaaccgaggaggcggaggttgcagtgagctgagatcacaccactgcactccagcctcggcaacagagtgagacttggtctcaaaaaaaaaaattagatcttgtgagacttattcaacgtcatgagaacagcaggggaaagacccaccccatgattcagttacctcccactaggtccctcccacaacatgtggtgattatgggaactacaattagagatttgggtggggacacagccacaccatatcagttactgagctgggcatcttctttcttgaatgcacattggcctctgaggcacttcctggttaacctcattccacagctgagaaaacccaggcttggcacaggcaagggatctgacccaacgtctcccatcttattagtggaaggaccaagactggacccacaactatgctcctgttttgagtcaccatgctgccctcaagatcagatctcaaaacaagcagacatggggggctcagaaagtccccagcctagaactttcctgtcacccaacgacactaagggctaagctggctgcttattattctggattcacactagaatgaccttggggtgtgtttcacacatgccaatgtctgcagtttcacccccagctaactgactatggatctctgggttggggcctgggcactgatattcatgcagagcttctgagatgatcctattacatcgccaaggttgacacctgcagaaacattgcacgctttttcatttatttagttattaaatatgtaatatttattattatttttccagacacagaagcgttgcaagaatagtacaaagacatcctttatacccttcactgagattccccagtgctaccattttaccccatttgctttattattttctaagtggcagataagttatcctttacccctaaatattcctgtgtattccttaataacaaggactttctcttatataaccaggcaatgatcaaaatcaggaaactaaccctgctacaatacggttttctaatgtatggacctcattcagattttgccagttaacccaatagtgtacattggagcaaaagataatcccagatcatgaattattttcagttgttgtgtctctgtaggtcccttttagcctggaacagctcctcagtttttctttatctttcatggtattggtattcttgaagaacgcaagatggttatttgatggaatgtcccttactttggatttggctgatgtttcttggtggtgacattcttatgcatttggggtgggactgtcacagcaatggtatcatgttcttctctgtgcatcacatcaggagggacatgctgatggtttaccccattacaccaaagtgaatgttgatcattcagtgaaggtgggcgcaggttcattgctttatattgcagaagccgtcatcagccatacttgctctgattaactgatcatcttccgtagccatttatctaacaaggctgtaagggtcttgaactcagggtaagcaagccttaaagcagaacagaagaaagaaaggaaggctctggaacctggagctttggcaaagggggcaggtccagggaacgcaccaccaaagttgctcctggcattaggatgaagaggaaggagagcattctgtctagaaggggtttggggttagcgagaggggcatgggagagtcagagtctgcccacttgtggttttgctgagggctacactgtggtaggcaggtctttcgttgctgctcttgaaaatgttgttccgtaatccttcatctaaaacagagcaattccctttttctcagttttggcccccttggcaggtgcttcatctgtcttctgttctcttatttttagagacagggtcttgctctgttgcccaggctggagtgcagtgatgtgatcataggtcactgcagccttgacctcctgggctcaagcgatcctcctgccttagcctcctgagtagctgggactacaggtgtgcaccactgcatgtggctgatttattttatttattttagttttctgtagagacgaggtctcactttgttgcccaggctgatcttgaactcttggcttcaagggatcctcccgcctcggcatcccaaagtgttgagatgacaggcatgagccaccacgcccacctctgtcttttctcttgggattaatgacttccacattagctccaggaataatttctgttaaggtgatgcctggcttgacacttctggtaactcctgctgtttatctattgcttatctccagaacccatgtgatgcttcccacttcaaagtgcactaacgccagtcagcttgaaggcatcccctgagctgctggcaaacaaggcctttttacccacagattaacctcttatttgttttaataaatgatcaaaacttggtttgcctcctgtgcgtatgttggttggggccgagacagggtggtggtgatttctgttcacctgggatctcaggcctcctggtgttccctgaacaaaagtgaggcaggcagagcaatgagcagtgttccccgtctgcctcgctgccatcagtatttctacctgtggttgtctctggcgcgttatcaggatgtgtcactccctcgtctttgttccctctccttatatttaccttcacctgggctgctaagtgctgcgggagaaacatcgcgttgttgtggagattgtggccacaacaaatttaggttccccaccctcaggttgtccctcactggtctcttcctcatacctttgaagaaaacaactcgtggaggtcgtcatattcataaaggtgaacatttcacagagcagggcactgttgtgggttgaattgcattccctctcccacaaaagacttcttggagtcctgacccccagcacctcaaaatgtggcatatttggagatagtcattacaacggtagtcaagttaaaatgaggttgatagagtgggctttatccagtataatgggtgtccttatggaaaggggaaattggccaggtgcagtggctcatgcctgcaatcctagcactttgggaggctgaggcgggaggatcacttgaggccaaggttcaagaccaacctggccaacatagcaagacccccatctctgttaaaaaataataaaataggccaggcgcagtggcttacacctgaaatcttagcagtttgggaggccgaggtgggtggatcatttgaggtcaggagttcaagaccagcctggccaacatggtgaaaactgtctctactaaaaatacaaaaaaattagctgggcatagtggcgggcacctgtaatcccagctacttgggaggctgaggcaggataattgcttgaacccgggaggcggaagtggcagtgagccaagatcgcaccactgcactccagcctgggtgacagagcaggattctgtctcaaaataaataaataggccgggcgtggtggctcatgcctgtaatcccagcactttgggaggccgagatgggcggatcacgaggtcaggagatcaagaccatcctggctaacatggtgaaaccccgtctctactaaaaatacaaaaaattagccgggcatggtggtgggcacctgtagtcccagctactcgggaggctgaggcaggagaatggcatgaacccgggaggaggagcttgcagtgagccgagatagcgccactgcactccagcctgggcgacagagcgagactccgtctcaaaaaataaataaataaataaataaataaataaataaataaaattttatatatatatagatatagatatggaaaggggaaattttggacacagatgcacacagggagaaggccacatgaagattggacttatgctgccacaagctaaggagctggaggaagctgggagggagatccttccctagcatcctcagatggagcgtggccctgacaatgccttcatctcagccttctggcctgcaggtgtgagacgatgcatttctgtagttctaagccacccagcttgtggtaccttgttatagcagcccgaggcatttaatacagcagcattctgagcccttcccatataaactcttcatttaatcttcaccacaacctccctgcccataagtgctgttgttattgtcttcattttatcttcgttttatccatgatgtctgcagcacagacaggttcagtaatttgctcatggtcacttgagataataaaaccccactctagggaacctctcatgcctgcttctggctatcacctttgctctcccctttcctcctgtccccttcctctccatctcctttatgaggccttctttgttgtcccatctctttttttgtatttttacattttattaattttttttgtgggggggaaatggggtctcgctatgttgtgcaggctgatcttgaactcctggcctcgagctaccctcctgtctcagcctcctgagtagctgggattacaagtgtgagccaccatacccagctgttgtcccatctcctaaatgtctgccttccccagcatccctgccccacagttcctgcctcagtagcccctcctgagcctcagccaccacctgtgctgatgaattgctgctcgccctcctcccaggcaggatgccccatggccactgcaggctcagcccatccacaacagattcacaatgcctgtccttcagggctggatttcctagatttcccagccaacggtaccactggctgaaaaccctgcagccatgcctaaatcctctatatgcccacgaccaacccctgctgattttatggctaaatccctgtctttacagtcaggaccagctgcagaatttgcaaggcccagtgcaagatgaaaacatgggcccccttattcaaaaatcagaggaaaagcactgctgaagtactaacatataaagcattttctttcttctgtggtctctgtgtctcaatttatcatgatactgtcatttgttatttaatgtccttctaagtaaagaaaaattcacattttaaattactagcatggattatactgttcctctttacattgtgcaatgccagatttaaataggaacattggactcaaatgtggaatcacagaaatgacataatttgtactttgcatgtgggttttttttgcctcacagaaacagtgagacgttgcaggaaactaattcagctgttttttgtttgtttgtttgtttgtttttgttttttcgcctgagacggagtcttgctctcttgcccaggctggagtgcagtggtgagatctcggctcactgcaacctctgcctcctgggttcaagccattctcctgctttagcctcctgagtagctgggattacaggagcccgtcaccacacccgcctaatttttgtatttttaatagagacggggtttcgccatgttggccaggctgttctcgaactcctcaccttgtgatccacccgcctcggcctcccaaaatgctgggattacagacatgagccaccacacctggccattcaattgtttttgtttcactttttcacacctatacaatcaaccaccactctctacctttggcttactgatgtgtaaggaagaattgaaaggaaaaataactatgactctgctatctttgcttctcctatgtcatcatttccagtggaagtggttggctactacagggaatcagatgagtagaaaaggctgggagagagttccttgtttgttcctgtttcttagaatgccattgacttggttttcaattctgattctataataagggaaagtgcaacctcttggtgctgtcagcatctctcgcagactccgttgtggacatagtaggcttcccttatgcccacttggagccttgctgggctcccatgcactgcggaccccccaagattctatgctcagggcacggcagacacgccatggggagtgtggtggtaactcatattgttgctggtgtctcgtctgcccacgcacatgttctattgccctgttggattttactgataaaacatagattcaggctgggtgcagtggctcatgcctgtaatcccagcattttgggaggccaaggtgggcagatcacttgaggtcacgagttcaagaccagcctagcccatatggtgaaacccactctctactaaaaatataaaaattagccgggcgtggtggcgggtggctgtagtcccagctacttgggaggctgaggcaggagaatcacttgagcctgggaggtggaggtcgcagtgagccgagatggcaccactgcactccagcctgggcgacagagcgagactctttctcaaaacaaaacaaaacaaaacaaacatagattcaaacataaaatgaggaggaattttaagacagtaacagcagagcattaagccaagctccgggtccctctcagcatggggccctgtgtgactgcacaggccaaacacccatgagttcatctcaatttccatccctctcacacccttccccactgctgtggtctcagttggcaccttcctcatttctcccccggaggactgcctgtaccctgatttcttcaagggtctctccagtccatcagacacaggccaacccagggtttttctgcactgcaatccaaccagcatcactcccctgcttaccagcctgcagtagctcccgcatcccttcaggttaagattcagacttcttagcaaggcactgcttatttctccagcctctgtgacagcctcaaaccctgcaatcgagctctgctgatcctggagaagctccctctgagcctttgcacacctgtccctgctacttgagggtgatttccacctggttacctgctggcatcacctcccacctggaagccttcctcatctctggggtgggtcagatgtagccgtttttgccctctccctacacaccctgcgtttcctctctcccagtgttcatctcgtgacgtacaataagcaattgactaacttgtccttaaggccagggccatagtgggtcttcttggtgacgaatgagggaggagcgagcgcttttgctctctaatggcatctgtggatcactagctggaggccttgggactctaagagccaagctatccaagtgctacaaataacaccgcacggcccccggtctttcctgtttccgctctgcgtctatcaaggaggagcagctgttttttgaagccctgctttccttctcacagctttgctcacccccaccctgcttgatctccaaactcagagccttgactttcctataaatacagtttctctccaactcaacttgatgcattcatgcagggtcctagttctctctttctgccattccaattctcctctttccattacatttaagagaaccctggctgggcatggtggcttacacctgtaatcccagcactttgggaggccaaggcgggtggatcacctgaggtcaggagtttgagaccagcctggccaatatggcaaaaccccatctctactaaaaatacaaaaattagctgggtgtggtggcacatacctgtagtcccagctactcgggaggctgaggcaggagaatcacttgaacccgagaggcagaggttgcaatcatgccactgcactccagcctgggtgacagagtgagactctgtctcaaaaaaaaaaaaaaaaaaaaaaccaaaacgaccaagaaaagggcattcatttatggtataagagctgaaagcaaaaggcagaggttcctcgatggagctctgctgggaccatgtgtagtagcagccattcaacctcttcaccacccagcgcacatccaggaaagccccactggtattgatttaggggttataaataaacattatcaagtaggtgaatttgcagctacagaatctgcaggtaatgaggattgattgtagatgcaccaatgaactggaggtcagattttcaactgaaccgtccaggagatggccagcaaccaagagctagaaaaaaggattcctggagggtggtgaagaaaacagaagtcttagaggctcagagacagatgaatgtaatccctcagctgtcacctgagctgtgactataaaatgaggcaacagattaagaatagtaagcataagattgaagccaggctcggtggctcatgcctgtaatcccagcactttgggaggccaaggcgggcagatcacttgaagtcgggagttagagaccagcctggccaacatggtgaaactccgtctctacctaaaatacaaaaaaaaattagccaggcgtggtggcccatgcctgtaatcccagctactcgggaggccaaggcaggagaatcacttgaacccaggaagtgggggttgcagtgagctgagatcttgccacagcactccagcctgggcaacagagcaagactacatctcaaaaaaaaagattggggcaatcagaagcgaccaccgtcagcaaaggaaggatgaaggggagtgaataaagggtccacaggacaattaagaaagtgtgggcccttggggccatttggtgaagcggagccaggtcactggcgagtgtgccagggaatcaattaaggatgaatatgaagctggaggccaggccagcatgattaccgtgtggacgcccgtatttctttacatttgctgactgtcaacccggcctcctgtgtttctgtgaaatacaaaggaagaaatgctgtgaccttccctcattctaaggtgaaaccaaagaaggggaaactgagagacctatctgaaatcctccaccgagccaatggggaggctggaatagatacagctggtcacccgacctgttctttaggcacggctttttggatttgccatttacatctgcttcaagttttagaaacttccaggctgtggcttttttgctgctttgggggaacaaagcatgtttggtcaagtgtacagtaaacctgtcctgctcctaaatccagtcatcttcaaaatagatttttgaggtttatagtgctactctccaaatgtcattatcatccctaaagtgaaaaaaaaaggtttaattattatgagcagtgaaattaccatataatcttccaattaactgaataaggcaccaaataagtgccctcaagccttaatttccaccttgaagttaaggtaggtatcatgcttaccttgatcatcctacacatcctcaaagtgggcagagttgaaaggctgtctaagcgggtgggatgggaggcggtgcccttccaccctcctgtctgtttgtcgagctctgttggtccttccgattggttagcgaccctgagtgtttctgagagccttttgttgtatgtgagggcagaaccactaatctggccaattccaagcagaaaagatcaagtatagatttcatatctgagttttaagtgctagtaaaaagttgcattaagttatcaaatgcactgtgatcctggcttcatcgccaagtggctctgcagtttgaggattacgctgtgtcccgaagaaaagaaaagaaaattgttccgtttagttgcttggggtaaagggggattgatccagttacttttaaattaatctaagtcagatggtgttcgctgcataactttctaaggttggtacttggtcaaagaacaaggtgttcatttttataggattgaaggcctttggttgaaaaggcatgaagaagtttctaccagtcctgtttgaaataaaatagtagtgtaatctaaggattgtaatacaagaccaacgcagcacatttagagtaactttttaaaattggttgacagatgtcaaccaattaactttttaaaattggttgatgatctctctctctttccgtagatgtgtgtgtagcatatcacacagagaaatctataagccctgggttatgttggttgctgatgaggattaattagaacctactactcaattattcacttttgatctgctcttgctctagtagtcttcttcactgtgtcattcattcaagagctgttcattgggccaggcgcagtggctcacacctgtaatcccagcactttgggaggccgaggcgggcagatcacctgaggtcggaagtttgagaccagcctgaccaacatggagaaaacccgtctttattaaaaatacaaaaaattagccaggtgtgatggcacatgcctgtaatcccagctactcaggaggctgaggcaagagaatcgcttgagtccagaaggtagaggttgcagtgagccaagatgatgccattgcagtccagcctgggcaagaagagtgaaactccctctcaaaaaaaagaactcttcattttcctatatgatgacatactgctatatgacaaactcttgctagctgctggagatacagcaataaataaagcaaagtccttgcttacatcccaaaggggagaaacaggcaacaggtttctacgtagcaagataaagcagagttaggggtgtggggcaggaggtgtgctgtcttgcagagcaacccggaaaggtctgactgatgaggccacattggtacaagaggctgaatgaagggaggaagggagaaagcagatgtttggaggaagactgcttcgggctgagagacagtcaaagcaaaggtcctgaggtcagagtatgcttagcattttcaagaaacaagaaggcaccgtggctgaagtcaagcaggagaatggcagaagatgaggttggatgaggctggatgaagtagaaggggcccagtggcatgggactttggatttttctttggagtcagaaacccatacaatggtacaatggattgacatgtgtagacaaatgccgagacagccacgaaaatctgaaatccatacatataaatacacaagtggacaactacataggaaaatccacttaaaatacatgcaaatatatggggggaaattatgggacttgatgaatcagagggttggtgtacagaaagggaaaagaagtaagaaaaagtgacaagatgggagataattgggtgactattagaaaccaatgttaactacaagaattcaaagtccaggtgtagcccagaacgaggtttcttccatttggtgcctcccctgtcttctggggcctcagagtctgtccttgtcccctctgttgtccacttgtgacagcagacggggagagagaggtagtggagggtcacaaggggtctcaagggccagaccttcaagtggcaaacatcatttctgccctctttccattgcccagaattttccactggcccactgtactaccaggagagattggggtagggcaggctgagaaatatactactcctgtgtgctcgggaagaaaatatattgtctctgccttgtctggactctcagtttaccttctctcctctgtggtttgtttcaggactaggatctgagctcatcacttaagagttgtcatagctatccttggtcatccctaacttgggagcctcccaaatatctaagaaacaggctggtggctctagttctcttcacaattaacctccaggttcactttcttagtctcacacctgggactagaggaaggacttaaactcatacctaacttcaccttttgatcttgatgcccctgggtgtgtagtgccagtcctgagcccttggtcatggggcctttcctgtaccctcaggacccctgactcatggctccccaccccccaaccccatgccattgccaattctctaaatgcattcacaaacacaaaagaaaagaacatctttttctggaaaaagacttcaaacatgtaaaaacaccttttattatttgtttatttgtgaatacaagggtgtggtcttttatctaaagcattaaccaagtggagggtggcaggttataaaaaaaaaaaaaaaaagcgggtgggagggaaggcaaggacgtagcaaattgaattcctttcttttcccagaagtaagattgtgaaattggcccctggtgattaggggactttagcacaccgatgtggggccagtgactgatattcttatatcctgcgttcagagtgactcaggcaacgtcaaccctcaggaaactcagattgcattggaagcctctggcttcagaaaagaaagagaggaaaatgtacagctcttttgacctcttctaaatactagtaactttttaggtcttaattattaggaaggaagaagggaaggaagggagggagggagggaaggagggagggagggagggagggaaggaaggaggaagggtggggagggagggttcccttttcctccaggctcagcagtgacatgtctggactgagggcagccacggggctatgtactggtctctgagctgtctaccttacatcaaggtgctcagagctgagagggctggccgcgagtgtaatttgattagagctggattgttcagcattgtaccaatggaagctctatgttaattagtgttctttaagatttacagtacatggcagggtacagtggctcatgcctgcactttgggaggcctaggtgggtggatcacctgaggtcaggagttggagatcagcctgaccaacatggtgaaaccctgcctctactaaaaatacaaaaaaattagccaggctttgtggcaaggacctgtaattcccagctacttgtgaggctgaggcagaagaatctcctgaacccaggaggcggaggttgcagtgagccaagattgcgccattgcactccagcctgggcaagaagagcgaaactccatctcaaaaaacaaacaaataaaaaaacccttacagtataattgtaataccttagagatgtgcagtggtttatggtaaagaaaaaaaaagatgcttatgcccactatatcatttaatcatcacagcaaaacatgaagccaccaattccaagaggtggctatcacagtcatacaccctaattcctagtgctctcttttatttttattttagctattacagataacaataaccaaaggattgaatatttcacttctttattattagtttgcatttccttgcacatccagtgaaccaacttcccaagagttggatctgtctccaaattccggaaaggtaactttcacctttagtaacagagtgcagcacagctgtgacttcataccatgggtgaccatacgaccatccaggaatcaaaggtctcttatcctccatcctctcattctttctcttcccaaagcacatgtttctatgagacagggccacagccagcaactcccacttctgacaccaattgtgtgaaaacacacacacacacacacacacacacacacacacacacaaactcaaagtactttctctattctttcactcaacaacaatcaacacggaatattttttgtgaccaaatgtttggggattcctccccaccaacaagcaaacaatcaattctgcagcaaataccagctggatatatactccaattcaattctgacaccatctacctggagacagcatcatatcccacagaatgagtctcggtccccaagactattgcccttcttcccagcagtcacagtctgggcctccggaacttctgaacaacaagcttcaagttgaggttcccatgaccccctccttgggttccatcaatatggagtggctcacagaaaaactttagggaagttcacttatgtttatcagtttattataaaggctattacaaaggatacagatgaagagacacatagggaaagggatggaggaagcagtgcggagcttctgtgcccaccgtgggtgccctgacttccaaaaacctgtacatgttctgctatccggaagctctccaaacccagttcttttggatttttatagaagcatcattacataggcacaattgattaaatcactggccattagtgaccaatataaccttcagttcctctcctctccctggaagttggggttgggctcaaagtcccaactctttaatcttgccttggtctttccagggaccagtccccatcctgaagctagctaggggctgccagccatcagtcaacttattagcatacaaaaacacatcactttggagattctaagggttttaggagttgtatggaaggaaacacgtgaaagatcaaatatatatttcacaatatcgcactcctgtagaacactttgggacacataccatgattctttgaaaatcagttatttacatcattctggtataaatcaatgaaaatgaccaaggcaagttgtaatcattttagggggtttatttgccaaagttaaggacacccactggggagacaggtctatgcctttctccaaagataattttgagggcttcaatatttaaaggggaaaggatggatattgggggaatatacaattttcataggagggtgagtagaggaaatagtcattcatgctgtcacttgtccggctaagggaatctgcaattttacataagataacgtaaacaatagtgcagaggaagcaatcagatatacatttgcctcaggcgagcagaaggatgactttgagttctgtcctgtcccattccacatctgtggataagctatcaattgacattgccagggtgaaattcaacagaaatattttcaagtaaagatcttggggcctgcaaggaatctccttgtgagcaaaaggtgagcgatgtatgtagctttttatctttgtagccgtcttagttaggaaccaaatgggaggcaggtttgtgcgacccagttcccagcttgactgttccctttggcttagtaagtatggggccccaagatttattttcctctcacactggtctttctatagtcactggattatttgaatattaatggattttccttgtaaatgtgatgaggatgacgatcccaagaaggacttccctgtgtctttcagaagacagaggagagctcctgccactcttaggggttcatgtcgtgaactcttcatctgtattcaaaaaatgaaaacctaagaactttggtctaagctgttctaagatttgctcaacccaaacctttcaggatactcctttgaggaaggttttacccatggcagtagctataagactttctgctgatacacagtgggaggattcaccagggaagagtatcttggagttacacatgagctgcaccaagatccctgagcgatgtgaagctgataaaaaagagtctacatccagctgggtgtggtggcttacacctgtaatcccagcactttgggaggctgaggcgggaggatcacctgaggtcaggagttcgagaccagcctggccaacatggtgaaaccccgtctctactaaaaataaaaaaatagccaggtgtggtggcacgtgcctgtagtcccagctactcgggagggtgaggcaggagaattgcttgaacctgggaggcggaggttgcagtgagccgagattgtgccattgcactccagcctgggtgacagaaaaagaaaaaaaaaaagagtccacatcctctcatttcctctcctcaccagtttaacaaggatcaacagagcatctccaggctctaatggattccaggactgatttcttaacagagtgtgcacaactgccatcttccaggatagcaaatacttgcccacaaatagagttagattgtaaaagctctggctgaaactattaagaaataaagcagttttgactgatccaacatgatggctaatttgactaggagggaatcattaacaaacagctgcattagtagttgttctttaaaaaggatctctcttcaaccagccaagaaaccaaggtgtgggaagttcagtggcatgactctgcccagcacactggaatgcatgagcttgcctaccgggaaagcagcatgccggaaagggtgtgagattgggagcagctcatctgtcatctgccttttgtttaaggacaaccttggcagctggctcctgctccaccccacttcctaccttcatcctgggagacgcctggtccacagggcatcttcactctcagtcctggcatccttgtttccagcaaccttctccaccaacctctcctacctccttccatggccactcctggacatttccataacctgcaaatccaccttgaaatcactcctcaaacaactcgtgggcacagcctcctgcctttccagcctgctgtgtgattccctcactctgaccttgctggtcctcattaggaactctggtcccttgcgcccctcccctcttctgtgctcatttcctttcttacatttagcttggagcccacggttcatcattttgagccgtctcttgacaatatcccccttcaaacttgtcggaccataacccatggtaagaaatctaataggtatgagcctggcgcagtggctcacacctgtaatcccagcactttgggaggctgaggtgggtggatcacttgaggtcaggagttccagaccagcctagccaaaaacagaaattagctgggcatggtggcgggcactgtagtcccagctactccagaggctgaggcagaactgcttgaaccagggaggtggaggttgcagtcaaccaaaatcacgccactgcactccagcctgggtgacaaagggagactccgtctcggtggggggaaaaggaaagaaatctaatacatacgatctaagggtcatgtgcatatgtatttatctgtacacatacatatatgcacaagcctctttcactttaactcaatcacaattatttaaaaatctctctctgaacatcagttcttacagctatgtttctcttttttttttttgataacttaatcacatctgccaagtcccttttaccatgaatgtctggtaacataatcactgatcctggggattaaggcctgtggacatctttgggggccgttattctgcctaccacatggaccatctttgactttcttcacttccactcacttttcttttttcttttttctgtgttttgagatggagttttgctcttgttgcctagcctggcgtgcaatggcgcgatctcagctcactgcaacctctacctcccagattcaagtgattcacctccctcagcctcccgagtaactgggattacaagcgcctgccaccacgtccggctaattttgtatttttagcagagacggggtttttccatgttagtcaggctggttttgaattctcattctcaggtgatccgcctgcctcggcctcccaaagtgctgggattacaagcgtgagccaccgcgcctggcccctccactcacttttcaaccttttccgaacaagcttctgtccccatcccccatcccatatggtttcaaaatggttcttgatggcctccatgttgctgaaaccatggggttgttctaattgtccttcttcctgaccttttggcactgtggaccaaacagaatggggcatgggcaggcaccctggaggaccagagcatttgggcagcctgtcctgctgtcacccagcagcccatcctcgtgggactgaggctggctacagaaggcattccgcacccgcttgctccatgagttatccagggctccatgtgcctaggctttctttattgtttaaaagtgtaggtcagataactacaggtgaagttttcttaaacatttttgtttacatatccaaagtggataactgggtgagctttcacaaagtaaagcacatgcctgccatcagatcaaggaacaggacatgatggccagctcgcccgagctcctcgttctcccctccctaacgctagctcctctcctcccataggtaatgctatcctggggccgaggtgataaggatttttttttccttttaaatagacttaatgtgttagagaagttctaggttcatagaaaaatggagaagaggccaggcactgtggctcacacctgtaatcccagcactttgagaggctgaggcgggcagatcacgaggtcaggagtttgagaccagcctgaccaatatgatgaaaccccaactctactaaaaatacaaaaaaattagccaggcgtggtggtgcatgcctgtaatcctagctacttgggaggctgaggcaggagaattgcttgaatctgggaggtggaggttgcagtgggctgagatcttaccactgtattccagcctgggtgacaaagaaaaaaaaagaaaggagaaaagagagaaagaaagaaagagagagaaagagagaaagaaagaaaagagaaagaaaaagaaagaaagaaagagagaaagaaagaaaggagggagggtgggaaggaaggaaggaaggaaagaaggaaggaaaaggaaagaaagagaaaagaaaagaaagaaaaatggagcaaaaagtgcagagttttcatcaacctctactcctacctgccacacacatacacacacacgtgcagcttcccccactagcaatatcaaacctgagtgcgatatttgtcataatcaataaacctacattgacaaatcactatcacccagagtccatagtttacatgagggctcacttttggtgttgtacgttgcatgggtttggacgtatggacaatgacgtggctccaccattgtggtatcacacagggtagttgcaatgcccaaaaagtcctctgtgttccaccaattcattcctcctttctcctgacctctggcaaccatggatattttcgctgtctccatagttgtggtttatccagaatgtcatatagttggaatcagacagtacacagccttttcagattggcttctttcacttaggaatatgcatttaaggtttctccatgtctttttgtggtttgatagctcatttcattttagtgctaaataacattccattgtctggatgtgggcctaggtttctttcgttttttgttttttgttttgttttttttttttgagatggggttttgctctgtttcccctgctggagtgcagtggcacgatctcggctcactgcagcctctgcctccagtgttcaagcaattcccccacctcagcctccagagtagctgggattacgggggcgtgccaccacacccagctaattttttgcatttttagtagagacggaatttcaccatgttggccaggctggtctcgaacccctgacctcaggtgatctgcccgcctcagcctcccaaactgttgggattataggtgtgagccaccacaactggccgggcctaggtttttgaagaaggaattgaactgagtgtagggcaggttgtactgctgacgtgtcttctttgtacttggaatgtgctaggactgatatacttcaaagtgcaaagcacctgaaggatctggcattagtcaattctatgcactgagcttctgcccccagaataccactctcagaataagaatatggtaaggccagttggataggtggggcatggattggaggctcaggccactgcaccgcacgtacaggtcttgatgtaaatggtctggaggaggtcaagttctgtttagcggggatagactatgtgacagagtgaagaaagataatggtctaaacgcagcaaaagtttcattcccactcacgtgacagtctgtggagcaggcagctcctctcttcatgaacctgggacccaggtatcttccatcttgtggctctgcttctctggagccttgtcattttttttttttttcatctagctacagtgacaagatcttttggataagccatgaatattaaaccaaaggcaaactctgaaaattgatttgatgtgtggtcagctgcttatttattccccggaccacagtccgggaatgctggggtgatggacaagaaggttttcatgaggaggctgaagagatctaagtataggggtgccagcctggggcacttcagaaggggcactggcctaggggtagcatcagggtgaccctgagttccctggggcagggtgtggctcatgacagggtgctgagaacccaccaagaaggctggaattttcagtactcattgttttatgagggcctgcctgtgtgccaggcgggaagacactgaccagaggcccagggccactgaggggtcttggcctggtctcttggtgcctggggggtacactgtgcaagcaatgatgtagttccaaggggcaggactctgacccacactcctggtgccaatgtccgttttgccactcatgttagattttgcttctctaagtgaacttactcaggatagctgggttcttggccattcttccagtggttttcaagggtgaaaaaaggagtttcagcaagacagctaacgtctggatgaacgtgccaggaaatgtctgtagccttcctctagagagcactctgggctggtgggcgtgaggaccccagggcaggctggctcagcccctttgacttcagatttcagggaaggccagggagctggattgggcgcctggattttccgagaattatgtttctgagaggattttgaaacctaaacaggaatactttacacacaggtcatcgagcaggaatcgggaagttcctaagctgccctccttcacgccacctcctcccttcagagaccaagggctgccaagctgtctcccacacacctcagtgaaaagtccctggctctcctcccagccgcctcgctgtgacctcgtgaggtgtgagaaggaggaaggggatctacattctggatgaaccttccttcctccttgccgagaaatagtttaggcccctgcgcctgctgggcctcagagcttctcagagcccagggctgagtgtggctcctgcaagctgcctgggaattccatggagtctgactggctgcctgtcttattcacagtctgctgcaacccctttcctaagcttgggtggctgaaaacaacagaaattcatcctctcacagttctggaggccacagtctgaatccaggtgttggcagggctgtgctgcctttgaaggttctagggaagaatccttcctggccttttccagctttgggtggtggccggcaacgctcggcattccttggcttcaggtgcatcattccagctgcagatggctgtcttccctctgtgtctcttcttttcttcttataaggacaccggttatatggtgttaagggcccaccttactccagtatgtcaccaacttaattcattacatctgcaaccaccctatttccaaatgtcacattctggggttcctgatgaacgtgaatttgaggggacatcattcaacccacagcagagccccaccatcgcctccctgcaccacgcccttggagcaggccccttctctacgcagggcaccctgcctgtctttcctctccagcagcaagacagagccaagagtgatttcttgaaatgaaattgcatcctctcattccaataaggcatggcctcactagtgggagatgagcaaatgaaagcctccctcaggatgggcatccacacatccaggggacactcaccccgatttttttcctggtttataaaggtgcttcaggactccttggctcctggccaatatcttagtgcttcctgaaggggaaagagccctccaaaccattcagtgggccatcccagaccgaggtttctgacccagacattgaaacaggaggagttcccttatccccccttgcagggcacgtgacaggggcatggctcgcttctcagtaccctgctgctcaaacccctagagggggcatgcagatggacaggtcgtggggagcgtttttgggctccgaccccacagcagcttgtagaattgggtgtttacagctcccgaagccccagtgggcatgtgttacagtggtctccttcagttttgccatctgcaggcggcttgtgttaatcagctcaattagaccctctgccttatcacaaagacagatggctttctgtatcccaggttcttgccctagtgtactcggaaaatcagatttcgcatggacttggagaaggagtgcaaggttttattgagtggaggaggtggctctcggatggggagccagaagggggatggagtgggaaggtggtcttcccctagagttgggctgcccagcagccagactctcctccgaccgcccccgactgatttccacatcgccccgctgtcgaaagcccgccagcatctgctggtgtctgtcagtgtgctcttctgcttctctgctcctctcgacgtccagccacttgtgtgtgtgcccactagggtcttgggttttttatgggcacaggatgggggtcatggcaggccagagtagtcttggaaaatgcaacatttggacatgaaaacaggagtgcctgttctcactaaggtccatgggcacaagcccatgggtggagccctcgccagggaccccacccttctctacccagcactcccctgccccccttccatgtcaacatgaaagctgacattggctcctgtgccccacctctgggcctggtttggtgacctctgcaccagagctgctagggaggccccatcccacatgttgttgattgaacagcccttccccaggggaaccaacgtcctcctgtccccaaacccatggaggagtggtgggttcctgggcctctagtaactcgactgaatattttccaggttacctaaccaaactcctgcaaaaccacaccacctatgcctgtgatggggactatttgaatctacagtgccctcggcattctacgataagtgtccaatcggcattttatgggcaagattaccaaatgtgtagttcccagaagcctgcctcccagagggaagacagcttaacctgtgtggcagccaccaccttccaggtattgccttttgtagacatgttaagatgatacagtttcaacacacactctttctctctctctgggtataaatatatttgtgattatatagttcaatccaagcaaaactgatccatgaaaaatcccaatttatacagatcaccagttttgtaggtgagctattatttgcttctcaaaggatttgttgcccaacaaaactaaatagaattcctacctattgtagagccccctttgtacacttcaatatgaatttatttgtaggtttactccttactttagtatagcaaagtacaaccaggatggattccaacctccaggcccacatctcccataaatactcctgtagaaagggaaggtaggttctttaatggaaaccacaagtatctctttgaggcagacatctgaagtcatgaccaactttttagaaaatgtactcaaagggctgggcgcggtggctcatgcctgtaatcccagcactttgggaggccgaggtgggtggatcatgaggtcaggagttcaagaccagcctggccaatatggtgaaaccccatctctactaataatacaaaaattagccgggcatggtggcacgcacctgtagtcccagctacttgggaggctgaggcagaagaatcgcttgaacccaggaggcggaggttgcagtaagctgagatcatgccactgcactctagcctgggcaacagagcgagactccatctcaaaaaaaagaaaatgtattcaaggaaggaaatatcagtaatatcagtaactgccttgtgctttttaatgatttgcttcttcagttgtagataatcatgtcattcttgcttggagctattttaggcagcctttactgactccttccttctactacatagtaccaggaattgggagaggtgtggtttaagtcattctttttgtggttggcatatttagggaaagatttggtataggagaaggtcaaactaatatttcaatgatggttttagactgtgcatggctttcaatcatctgagcaacttctacttcaccatccctggcccctaacatatataactagttgaccaggattactgagtcacttggccttggatttttttttttatgcctcccaagttccatatgaatacatttaaagcagggagtttagagcaggtggaaagttggaagtctgtttgattttgtcgaccgtaggaaatatggataaagatacatttgctagaactaaggagaaataagagtagctttaatgctgtgtagctctccctaaggcccaaacaggagacgcaaactaatgtgatgatgtaagaatttttctatttctcacaccatcccttgcttccactccaagcatggtagtatctgggtatttaggtgattggtgaaacacaccaattgagtagccaaaatgaatgtgtctgaatgactccccatgacatggtttctataccttgaggagagacaacatgtttcttcaggagacaagaagttgctttccctgtgtgctccactgtcttagtcctttttgtgctgctataacagtgtacctgagcctgggtaattcataaggacctgagattgatttctcactgttctgaaggtcaggaagtccaagagcaaggcgccataggtttggtgtctctacttccaggatggctccttgaacactacatcctctagggggttggagaacgctggtactcatgtggcagaagaatggaaggggcaagagaaggagagagggccaacttgccttttataacaagcctagtgccactctaacaacctactcctgaaaaaaaacaaaaaacaaacaaacaaacaaaaacagtattaatccattcataagggtgaagacctgatggtctaatcacctcttaaagactccacctgttaacactgttactgttaaagcagcaattacatttcaatgtgagttttgggggggataaacattccagccatagcacccaccctacccctaactctctctgttgggcgccaccccaggagctacatccctcttgacccacccccatttctcagccacctgccctggccatccatccttggatcccaggctacctgctgccctcctgggtgcatgaaaggaatgttggccagtaccaacatttttttaaagtggctactttgtaaaagtaggaactcttggcatacactagagcatgggcaccacctgcaccattccacgggtacctgcctctgccagatacccctgagggaagaggatgttctataaccaggccgacaggttagcatttgtgaacacagttctgacgttgttgggagggtttgtttgccagaaacatccccatgcgctactctttcaaccagaggtcaagaagtcctttacttttgtgtcttttttgtttgtttgtttgagacggagtttcactcttgttgcccaggctggagtgcaatggcgcaatctcggcttaccacaacctctgcctcccaggttcaagcaattctcctgcctcagcctcccgagtagctgggatcacaggtgcccaccaccacgcctgctaatttttgtacttttagtagagacagggtttcactgtgttagtcaggctggtcttgaactcctgacctcaggtgatctgcccgcttcggccccccaaaatgctgggattacaggtgtgagccaccgcgcccagccttcttttgtgtcttttaagctgcactcggagcacaggcaaggtgcttcctcagagggaggttgcttaacatggggagacatccacacaggagaccacagctgatccatcccttgactgtcagcagcaagtccccctctctgcattttccagctcatgacatagtttggaaatagccctgccctggggtctgctctgtggttgtaacagtggagccctccggtgacatctgtgggccaagtcatttcaccatgacctttggccatgccacatgcagtcatctgaaagctgcaccttctggggtctgaggggtttcttgggtattttttcctgattgagacacatctgctgggcccctgagagaatgggggatacctggcggggccagcattcttcacggagctattccacgagctactatgagaacatggtgactcagagaggctcacgtgtctgcactaaattcagacctaaagtaataagcagattcttgggaactttttttttaactgtacttgatgtcctttttgtttttgttttaaccagacccaagttcaggacctctgtgtttatcacaagcaggacttgttccatttgggaacgaggacctagagaacagcagcaaaaagctgagccttcccaggacctggaggagggtgttctgtgagcttccacagagcagatgccttaaaaacgaaggagctgtctggaaaaaatcaggagagagagagagattgagatttgcaggaaagcctttactgccaatgctcaacagaaagtctgagtgttccactaagaaaactgctccccgagggagaagtgggtcccatcctcttgagtttgatgagggtgggaatcagctttgtaatttttattttttggcctgtggatggttcgtaagctggaaagggtttgggtccccaagagctccccgatgcacagctctcctgtgtcctgtgtggggctatttaaggatgaaaggccaggactgtgaatcctgatggtcacagctctctcagcttaaagctaggggaccccgctcgaaggggaccctgaagtaccctgcaccccaatatctgaaagtcctctgacctcgcttgcaccccctggagcctcggcactcagtgcctttgctgaaagtagcagccgccgcaccagtagtggtggatcagaggttagttttcccaggagcctggcactattggatcaggtttcttttcaggagaaagagcagggagacagggagctaacccaatcacccacgtctatgctctttggccttagacacagcttggccaggtggggaggcgtccttccctttgcagagcccagagcagcccaggttcgggtctggcagtcactgtgagcagttttcaagcctgtcccttttctaccctctccttctagaaggtgctggacgaatgccagaaccagcgggcctgccacctcctggtcaatagccgtgtttttggacctgacctttgtccaggaagcagtaaatacctcctggtctcctttaaatgccaacctagtaagtaacttcggagggggacagtgtgtttggggtgtggttctcgtttccttcacactcctggtcaaaattctctgcccgttggcatttgtccaactttgaaactcattaacagacacattgggctccatcctacccagttttttagagacagagagagaaagaaagacagagaaagaaagagagagagattttgtgtgtgtgagtctgcacatgccttcattttcttacaaatgcctgaattttaaaaatcctttccaatatgtaaaactcagttgtactgatgctacaactctcaggggtggtgagagactgcaattgctgttcctcaaagtgaggagctggttctgcgtttcagaggtgtcttgtgctgagattgagaggctgcctgtttttccttgaggcccagtggcccacttgccacctgcgcccactgcttcagatctttaagaaccagctcctcccgccctcacccacggcaggggctccttgttccccaggagaatgagaggggatatggctggagccatctcttttattctgattcttgttgttttctccattgacttttgccatttctaatacgcatcagctttgtgatgggcaaaaataatccatcttccgtgggtgggtcacacttccaggagccaagagcctgcctgagataaatcataggtcactgtggcattagaggttcttgcacactttgttgcaaagaaacgatagcagtgtgtttaaccaaaaaaatgagaagttaagcactttttttttttttttttgagacagagtttcactctagttgcccaggctggagtgcaatgcgcaatctcggctcaccacaactttcgcctcccgggttcaggcagttctcctgcctcagcttcctgagtaactgggactacaggcatgcaccaccacgcctggctaattttgtatttttaatagagagagggttttgccatgttggtcaggctggtcttgaactcccgacctcagctgatccacccgtcttggcctcccaaagtgctgggattacaggcatgagccaccacgcctggtcgagttaagcatttttaaacctcctccctgccacccaacacaactgttttcactttttgcgttttgttgtctgttagctcccgccctggttccccgagaccctggtggcctaggtgccagacttatgtggggagaggtcaggccacactcgtactatggtctcaggtacacatgtggggagaaacccccccgatctcttcagcagatatgcaggcttctgtcaaaccccttccctgccagggcccagatacgtcaaagctgccctgtgttcttctaacacagcacacgcaaaggcactcacactctcacagcacataacagacgctcctcacactcacctctcataatagacatcatcacacacaggcacacactaacacaaccttataccccattatacacactcaaacacatacaagctgtcacactcactcacactgtcatacatgctcacacacactcacatgtacagacaatcgcaaatacctacaagcaggcccagccattcagaaccgcctgaactcccttcgtgacccctctccaccctccctccgcccctaggcattgggatcacctcctgcctcagtcaacagactcaggaaatcacatcaagatctcagtgttcttcctcacttccctccaaccgctgaatctcacagacgactgtgtcatagccttgaagacacccttgacggccattagctttgccttccttttttttctgttctccacttccctccttccatggtgtaaaatattgccctttaaaaagtggcccttggctgggggcggtggctcatgcctgtaatcccagcactttgggaggctgaggcgggtagatcacctcaggtcgggtgtttgagaccagcctgaccaacatggagaaaccccgtctctactaaaaatatgaaattagctgggcatagtggcgcatgcctgtaatcccagctagtagggaggctgaggcaggagaatcgtttgaacccaggaggcagaggttgcggtgagccgagatcgcgccattgcactccagcctgggtgacagagcgagactgtctcaaaaaaaaaaaaaaaaaaaaagcggcccttgttcaagatattaacaattggagacctgaggtggtgggaatatgactgttggttgtgatattctttcacattttctatatgtttgaaatgtttcataataagttgagaaaaaccagcctctaagagaagtcaaatgacctttgtaaaattgaccgaacctcggataagtcagtgcagagccacagccccatgactatcgtgtgaggtttcatctggtttattcatatcatttcagcaaagcccctactttgcacaggagtggaatatgaagagaactcacatcccacagagattccctgagtggcggttctatcgtgggtggtgtccacaccccctccagggtatttctcaaccttccttcacccagcaagcattcctgagatcttcacacagctggttccttctccttgtgtaatttccaccccaaacagcacctttcaagagaggctttctctgtccaaaaaacaacaacaaaaaacatcttcctctcatcctgccacccctctctatcacagcatcctattttttcttcatagcagcatcatcgtttagatttaccttatttgtggcttgtgtatgatttgcacacacactgcatcagactgtgagcatgatgagagcaggaactctgtgtggttcagcattgttaccccagaggaacaggtgcttaatatgtattcacagagcaaatgttcacccagcaggggccaggtcctgtgctcagcattggggagacacaggtgagcacgtcctcggtaaccagatcatccagtcccgtggggcctgatattcactgtgagtttcacacaaatatgtgcaagattccaggtagggtcagggcttcatggagaggcacttggtactacgcaagcagctcacagaagaatcttttttttggatagggtctcactccattgcccaggctggagtgtagtggctcaatcttggctcactgcaacctctgcctcccggtttcaagcgattctcctgcctcagcctcctgagtaactgggattataggcatacaccaccacacctggctaatttttgtatttttagtagagacagggtttcaccatgttggccaggctggtcttgaactcctgacctcaagtgatctgcccgcattggcctcccaaagtgctaggatcacaggcgtgaaccacagtgcccagcctcataggaggaattgaccttgactaggggttcagtggagtctttttggagcaagtgatgatggagctgagaactgcagggatggagggcacagaaagagtgctccatacggaagcctgtggctgcgggttgcaggtgcattggcgcagccagccacagggtaggagcacagcaccaagacaggagagagcaccagctggggagccggagtagggatcctgagtcctcagagccaaggaaggagttggggctctatctatagggcagcatttaagcagggagggtgctgtgatgaagtcataaagcccctctggctgccccatagagagcagatgagagacagagcccctgtgtaacctgaacaccagaaacctgagcactgccatttaggaggtggaagtgagattgtctccacaccttcctgcctctttttctgcatctctcacacctcctgaggctcttcttctcaattcccagttccagtctgagcaggacactgtgattgtccaaaggctgcactgctgcaccctgtggtgtgcagagccagttcttatgatgagagccagttatgcacatgtcttaccagctctgcctgtgttctgtggcatctgccacggtgggagtatttacaccagggaaatgggcaaatgccactgatcgggtttatttgtttgtctttacggaaagctattttaccagcaaggctcaccggaaccttcttttccctaatgtgcactatgcttccttcctcaaaatctcacctcccaaattgcatcccttcaggaaatgtaggtttcagcgaggcttggatttaggcagttctgggttcatattcctttctgctgcatatcgtatctgctgtgtgttgggcagtgtagggacactttctaggactcagttgtaacatgggattatgtctcttctgcatagggctgttttaagactgtgaaaacacagtgttgtatgtaacacgctagcacaggaccatggagttgagctcagcagttggtagctattatttcaataagctgattcaaatcactctgctaaagatatgaatgactaaaggatatagtcatgcctgtcatttcagcattttgggaggccaaggcaggagaatcatttgaggccagtcattagagactagcctgggtaacatagggagacccctatctctaaaaaaaaaaaaaaaaaaaacaattagcagggcatcatggcaggcacctgcagtcctagccacttgggaggctgaagtgggaggattgcttgagcccaggagtttgaggttacagtgagctatgagctcaccactgcactccaacctatatgacagggtgagatttatttactaaataaagaaataataaaaataaataaaagtgactatctacatttcagcatcactatgcactggcaattgtatgcaatgtcagtaataaaatactcccatcgcggcagatccttcctctgcccacctttgaaaggtggctagtgatgtgttgggaacaggcaccccaaaatctggccataaactggccccaaaactggccataaagaaaatctctgccacactgtgacatgttcgtgatggccatgatgcccatgctggaaggttgtgggtttactggaatgagggcaaggaacacctggcccacccagagtggaaaaccacttaaaggagttcttaaaccacaaacagtagcatgagtgatctgtgccttaaggatgtgctcctgctgcaggtaactagccagagcccatccctctgcttcggcccatccctttatttcccataaggaatagttttagttaatctataatctatagaaacaatgcttatcactggcttgctgtgatgatttatgtgggtaaatctctgttcgaggctctcagctctggaggctgtgagacccctgatttcccactccacacctctatatttctgtgtgtgtgtctttaattcttctagcgccactggtttagggtctccccgaccgagctggtctcggcagtgatgtgcttttgtgactgttgtatcgaaaagaagcagaatgacccacataaccctctcatttgtaggttggtgcaaaaataatcgcggtttttgcccattgcttttaatggcaaaaatcacagttacttttgcaccaacctaataaaatgaggaggcggggatttcattgctcttgtcatttaagcagagtcgtggttctaccttcccaggcccctgccatcctccccatctaaactcccaggagagttggcaacccacttctggaaggctgcccacaccttctctaatctgagaccaattgagaactctaacccagctctaaaacaaattctagtcttctaagaaaagtagcaatgatgttagtagtttcctaattttttataatccagaaatgtcactcttatgtggcagtgaattcgcacattcccaaggaaccaagtgactcaacataacacaacagtcacccccaggatgtaatgtgacacgcacaggcccctccgttccaggagatggtttgcccataatctggggacgaaatcgctggaggccttgcatgtgggtgttgcgttactgtgggagggttttgttggcatcaaggctacctttaatgaatgggctttaataaatcaaagagatgtggctaataaatgcgtttcatgacatgccttaaacaaaacaaaacaaaaaaaaaacctcttgtaacttttaaatattttgatttataaaaaaagaaaaaaaaaagacttccatttaaaaagtttccaatttgtggagataaagcttgtttttgtcctgccttctcccatcctctttctgtgccagctctgccatgggaaggcattcttaacatttttctgagttcttatggttggaaggggactttggctcttttggtgtttctatccaagccctcttttctgcatcaaaggccatcgttcactctgggcctttgaagtcaggcaaaattttgttgttggtgggatttagcatctactcataaactgcatataaatgccagtgcggatatgactcaccaaaaagaatcgaaccttctgacgttcgggtcagacttagcagtcttttatctagagaaagaaaacaaaacttgccttggctctaagtttaagctgttgaattaagattccagtgagtgggtaaagggccttcgagacatttgcttagtcaccattttcatttttcttcctcgtggaggttcttcctgcgtgttaaactaccagggcaggatagggattttgtgagcatctgtaggctggcttctgctcccagcctttcattcatcttgaatgttcccgtcctcatggatgaaaggatagcaacaaagtttgccagcagcagagctggtggtcctcttgagattctgtagttttccttcttgtggtccaaaattttgtctcactgttgtttctctgcttttggtacaaagtcatggaaatttacaaggtacagaaagatggcgtttaggccaggcatggtgactcacgcctgtaatcccagcaatttgggaggtctaggtgggtgcatcacttgaggtcaggagttgaagaccagcctagtcaatatggtgaaaccctgtctctactaaaaatacaaaaattagccaggcatggtggcgcatgcctgtaatcccagctcctcaggaggctgaggcaggagaatcgcttgagcctgggaggtggaggttgcagtgagccaagattgcaccccccgcactccagtctgggtgacagagtgagaccccgtctcaaaaaacaaaaaggtgacatttatatttggaaattattgtctttcattttttaagtttggagcttagcatcactgacaccaggataagaagatccagccaggtgccatggccctaatgtgtacagctcatgcctttctgcagggattaaggtgggcgttttcaaattgtgattgcagcccatggtaggaaaagattttcactttttggcccagtggaacacatactcatatacacacaactgaaaaagaaatgtttaaattacaaaacagtgtttatactttcttcatgtgatgccctttgttgttttctaaactactctatgctttattttcaaaaattgctggttacaactcactaatgatttcaagactcatgaatgaacctcaaatcacaatttggaaaactctggcttgaggtgtgtttgggacctggaatcagcctgcacttccaatccaggaaagaaaagtggaagaacatgagcacgtgagaggagtgagaggctggggtggaagaggttctctctggacagtcttcccacccaccccaggccagcccatgacagcccaagcagttcttgccatttaactcttgtttgcagttaacgccaatgcttgtttggctgaaaaatgcacctgtccgctatgtggttgccatttcaaagtagaaaactccagaacagtggtgatagggtagagctagcatttttaaaagaattttctttacaaaatgttggcaaggataagaaccacatatgcaaataaatgaccgtggtcccctttatattttgctgagcaaaatatagtagctgggattacaggcacccaacaccacgcctggctaatttttgtagttttagtagagatgaggtttcaccatgttggccaggctggtctcaaactcctgacctcaggtgatccgcccgccttggcctctcaaagtgctgggattacaggtgtgagccaccacacccagccgtgttagctaccattatttaaagatatctttattaagatatcatttacatagcataaaattcacattttccaagtgtacaatcccatgattttcagtgaatttactgagtagtgcaaccgtgaccacagtccagcatgggacattcccaccatctcagaagtcttccttgtgtccatttctgtcactctgtgacctcaccttcagcctcaggcacccactcatctacattctgcctctaaaggtttgcctcctctgaatccttcatataagtggaatcatacctacgcagtcttttgtgtctgcagtgttagctcttactgctttaaaaaatcaaatcattggccgggcgctttggctcacgcctgtaatcccagcactttgggaggctgaagcgggtggatcacgaggtcaggagatcaagaccatcctggctaacacggtgaaacccatctctactaaaaattcaaaaaattagccggatgtggtggcgggtgcctgtagtcccagctacttgggaggctgaggcaagagaatggcatgaacctgggaggcagagcttgcagtgagcagagatcgtgccactgcactccagcctgggcgacagagcgagattccgtctcaaaaaaaaaaaaaaaaaattcaaatcattattaaacatttttactaattaaatggttttggagtacattctttaaaaaaaaaaataaactgtgttttcttcaacagtgcacgcataatgccaactttgtacgacattgcaaagaaagattttactatgataagcagattaaacaaacaaacaaacttttccctgaattctttgggaacaaagcactacctggtccaaaacatcctaacctagaatgcaccatcagcttgacagtcagttgttcctggatttaccagatttggggcagacttttcatgcttctctaaagagggattcttaactgacactgtgccttgtttttgcccctttcctaggaaaggaaatgatttgatttggtatcataccatctttcttgcttttttttttttttaaattagagatgaggtcttgctatgtttcccaggctggtctccaacttctgggctcaagcgaacctcctgtctcagcctcccacccaaaatgctgggattacgggtgtgagccactgtgcccggcctctttcttgtcttttaaacaaataaatgtaagccagacatggtgtgcattcatatattcccaggtacttgagaaactgaggcaagaggattgcttgagcctaggtttgagcccaagagttcgaggctgcagtgagctatgattgcaccactgcactctagcctgggtaacagagtgaaaccctgtctctaaagaactaaactaaactaaaataacaaataatacctacatgcatggggatgccagttgaggggctggaggtgaggtttaactgggctctctccagagagagaaagaagcttaatgcttctttcaagtaatttctggtctgtctttacctatgtggatctcaagccaacatttgagaaaaggcccccttcagtgaaggaatgtgtgaccttaagtggtgagtgagagaaacttcctttctagccaggtccttcctgggacctaactccatgcatctgcttccttaacgccagcacctctcctccatttgccccttagtttaattcccagggtctttgcgcttgtcaacaggttacttcccacccgcttcctgcagagggctttgttttctggggtcagagacagcatgagcccacagggccatccccactgcccccttctcagggtgcagccccggggaaatgagcaatgggacttggacagagctcaccaattccttctgggggaagctgatggtgccttcaatttttgtttttgcttcagatgaattaaaaaacaaaaccgtgtgtgaagaccaggagctgaaactgcactgccatgaatccaagttcctcaacatctactctgcgacctacggcaggaggacccaggaaagggacatctgctcctccaaggcagagcggctcccccctttcggtatgtgcttttgtgtgtgtattagccagggttctctagagggacagaattaatagaatatatatatatatatcctatatatatcctatatgattgtgaaagtcaatacttaacacaatcacgatcttgtgatcgtgtaagttaatacttaataaactcccgtgtgtgtgtgtatgtatatatatataaatgcttgtaaacagtaatctgccaaaaataaataagtaaaagaacaagaactggccgggcgcagtggctcacgcctataatcctagcactttgggaggctgaggtgggtggatcacgaggtcagaagttcaagaccagcctggccaacatgtgaaaccccgtctctactaaagctacaaaaattagccaggcatggtggcgggcacctgtaatcctagctacttgggaggctgaggcaggagaattgcttgaacccgggaggtgaaggttgcagtgagccgagatcgtgccattattgcgctccagcctgggtgacaagagcaagaccctgtctcaaaaaacaaacaaacaaacaaaaaaacaaaacaaacaaaaaaacaagaacttaagacataaacactaagaatagtacccagctcccctttatatatatataaagaatagtacccaactcccctttatatatatacataaaggggagtttattaagtattaatttacacgatcacaggtcccactatagactgtctgcaagctgaggagcaaggagagccagttcaagcctcaaaactgaagaacttggagtctgatgttcaggggcaggaagcatccagcacgggagaaagatgtagacctggaggctagggcagtctctccttttcacatttttctgcctgctttacatttgctggcaactgattagattgtgcccaccagattaagggtgaatctgcctttcccagcccactgactcaaacgttaatctcttttggcaacaccctcacagacacacccaggaaatactttgtatccttcaatccaatcaagttgacactcactattaaccatcacagtagggttatacacagggcgccgtctgagtggattagggccctggctccccaagaaaggaagctatgccagcgggcagtgcctggattaaagggaaagtcaagggcagggaggaaccgccacaccatgcacaggctctttctcctccacattcctgaatccctcagttgttccgtcattccacactgagtagttattgagcacctgctgtatgctgggccctgttctaagcatgggggagtcatcaatggcacaacacaaagtctacaccctcgtggagctgacgttccagcagtggatggggaagtggtgagaaatcagataatgaatgggtgcatatgtcatatgtcaggtgcagatgggataagtgctaaggagaaaaatccatggggaagggcaggtggagaaggccaggggttcctgcaaagaggtgcaattttagggagtgatgggcatgctgggcttggaggaggtgagaaagtgagcctgcagccagttggggacaagtgtccaggtagagagaagagtggacgcaacgccctgaggctggactgtagctgggtattcagtgctaagaagggctctgcaagtcattcttcttagaggtgatggccatggtaggactaagagcttcactcatcaagccctcctatatgattcagagaaacagaaccgataggatacgcaggtgcttgtatctatggagagattttaaagaattagttcacagggtggtaggggctggcaagtctgaaacctgtaaggcaggccggcaggctggagacccaggaaagagttgaggctgcagttttacatctgaattctgcaggacagcaggctggaaactcacgcagaacttctgtgttgcagccttgaggaagattcctttttagggaaacctcggtcttcgcttctaaggccttcatctgatgagatgaggcccatccacgtggtggagttcatctgcttgactcaaagtctactgctttcaacatcagtcacatcttaacactttcacagcaacatctgggctggtgtttggccagacaactgggagcaatagcctagtcaaattgacatgtgaaattaaccatcacactccaatctgtgctggtgaaaaagcttgatctctctctgctgtattaccagagagaacagacccagctgtgaaacagcccaaggacctgcgcttattgatcaaaatctaaaatgagctccttaatatgttaaattgctacaatgtatgtgtggatcgcaggtgaaattcaacattaatttaaaaaagaaatgcatgcctaagtaataccttggacctgaaaaaaagaaaatgaacaaaaagtgagctaagcgcactttaactcaggtgagtctcaagagaaaacaaaaaaagccatttggaacacgtgcctcccaaatgcgaagccccgtattccgggaaggcccttgtgtcgagaatggtggagggtctgttggagggcagcccaggcagactgcaaaagcaggctggtgtgggcatacactgcccttaactcgatctgggcatgagcattcctgtcctgacaggctcagcagccaaatggggcagagaggcacgtgtgaggtgggtccccattgtccattaatgacactacccactgtcctggtccagtaagttgacttgtgagctcctgaaccccatcttccctctctgataacacctgcgtgtgttcatttctctctcttaaatgtctccactccctcctcctttctccctgctactgccttagggaaagggaccattgctgggccactgtagccatctccttactcccaggcttgcctttctccccacagtggcctcagctatctttctttctttctttttctttttctttcttttttttttttgagatggagtctccctctgttgcccaggctggagtgcaatggtgcgatctcggctcactgcaacctccgtctctagggttcaggtgattctcctgcctcagcctcaggagtagctgggattacaggcgcccgccaccatgcctggctgatttttgtatttttagtagagacggggttgcactgtgttggccaggctggtctcaaactcctgacctcaggtgatctgcctgccttggcctcccacagtactgggattacaggcgtgagccactgcacccggcccaggtagctttcttaaaggcaaatctgtcactaacccttcctaacaccctgcaggggctccctgtattatatggttccttagctggatgagggacccttggtgttttaacttcttcctgcaaaaaggggcttcactttttttttctttaattcttaacctttataatattcaagaatgcctttccagaacagggattgtgcaaggcattgtggatctacgtcttctttacgggctctgtgttcccctactcccactcctttttttcttttttctttttttttttttgagacagagtctccgtctgtcacccaggctggagtgcagtggcacgatctcggctcactgcaacctccacctctgggttcaagcaattctcctgcctcagcctcccaagtagctgggattacatgtgcatgccaccatgcccagctaatttttgtagttttagtagacacagggtttcaccatgttggtcaggctggtctcgaacttctgacctcaggtgatccacccaccctggcctcccaaaatgctgggattacaggcgtgagccactgcgcccagcctccatttcctttttttttttttagacggagtcttgctctgtcccccaggctagagtgcagcggtgcgatctcagctcactgcaagctctgcctcccagtttcatgccattctcctgcctcagcctcccgagtaactcgaactacaggtgcccgccaccacgccccactatttttttgtatttttagtagagacagggtttcactatgttagccaggatggtctcgatctcctgacctcgtgatccacccacctcagcctcccaaagtactggaattacaggcgtgagcaaccgcactcggcctccatttcttaatattgcagagaagcacctcatttcccaggcttactagtctaacttagccacatgtgttttaagaagcagcagtaagtaacatccctgtcagttgttcttttcagcagaattcagttggccaagcaggtaaatctgtaagccgaatggtttgtgttcacttggtcactgcctttcattcctaggaatggtagatgaaagttggatttaattaattaatttatttatttatttatttttgagacagactctcgctctgtcgcccacgctggagtgcaatggtgtgatctccgtttactgtaacctccacctcccgggttcaggtgattctactgcctcaacctcctgagtagctgggactacaggcatgtgccaccacacccagctaatttttgtatttttagtagagatggggttttaccatgttggccaggctggtctcgaactcttgacctcaagtgatccacccgccttggcctccccaaagtgctgggattacaggtgtgagccactgcgcccggctgagagttggatttaaaaaggaaaagtataccagacgcagtggtttatgcctgtgtaatccctgctactctggaggttgagatgggaagatcccttgaggcctggagtttgaggttgcagtgagctatgatcgcacctctgcactccagcctgggccacagagaaagaccctgtctcttaaaagaaaaaaaaaaaggaaaagtaattaaagaaagtgttagcagatcccatggcctaaaagacaggtttccatggagagtggaggaattctgaggtcagccagcagtgttaacgccctcagaaaccctgatgtagaaaggactgtgaagaaaagtctgtgactctgctctgtgccccttgcttggctgttcaaggtaaaaagctccagctcacagagtgaaagcctgctcgcccttctccctcacaatcaagcacttgcgtccattgcccttggtgtacgtgcaagggtgaggaccagactcttctctgcatttgtggccatagccaaaatgccagagcccttcttgccctgtgctctgcagcacaaagaagctcaaagacaaaaatcaaagggccctgagggtgccctgttcatcaggtcctcagcctcacatggaaggctcagctctgacctcaccattcaggtcagtgctaagggcagaaccacgcatgcgtgtggaaatacaaacctttggctctctgagctggtgcattttctccatctaattgaatgctatgaaatcatttgcttcttggcccaggagccaataacacctgcgtgtgttccaacaacacctgtgtgtgttcagttggatgctgtgctcttctctctcttaaatgtctccaccttctcctcccttctccctgctactgccttagggaaagggaccattgtcgggccactgtagctgtacatgaaggctttaaactgcactcggcctgttctccccagagaatcatcagtttacccctcgtgtccaaacatgctttaatatcatccacctgaaaaagcacactgttttgacctcccgtctcctacccgctatccgtccctcccttcagtcccatgggcagagcatttgccgtctgcagagaatttgcagacagtcccagggcggtcccatggtggcacctctctaatctgtccactttgctcccagcctcctccgggcatctctcccctggacatcgaagctgcctcccctcttcgcttagcagccagagggattgtatttatttatttcaaaaaaattgttggagacagggtctcgctctgtcatccaggctggaatgcagtgatgcaccaagtgcagccttcatgtatggtctatctgagccaaggagaaaatgcccttagcactgtcctgaacggtgaggtcagagctgaaccttccatgtgaggctgagggccagatgaacagggcatcctcaggaccctttgatttttgtctttcagcctttttgtgccacggagcacaggacaagaagggctctggcattttggctgtggccgtgaatgcagtgaagtattcatcatagctcactgcaagcctccaactcatgggctcaagcaattctctcacctcagcctcctgagtagctgggactacaggtgcatgccaccatgcctggcatggtggagatgaagtcttgctattttgcccaggctggtcttcaactcctggcctcaagtgatcctcccgcctcagcctcctaaagtgctgggattgcaggcgtgagccactgagcccgaccaggattttatttaaattaaaccagagcacaccgcacctccgcttaaagccctccactctgcacactgtaattggaatacatcagtcttcagctgtggtcctgctgcacacgcctcttccctcactacctctggagcactccacctttattcatacccctgggcctttgcacaagctgtccctttgacctggactgtgctcaccccatatcttgtgtggctggctttgccacacaagacatcgacccagatgtcatctcagagaggtttctccaggcaccggccagcatggcacctcgtccctgcagtccctctctggcgacccttttgttggactttctccacagcatggagatagaccatggtatgtgtgtgtggttcatctccccaggagctaagcagctctgcagggactggtctgtggaattcccagcaacttaagcagtgccaggcatagagtgggtgctcacgtgaatcttgaggcacaggaatgaatcagagcccctctgaagtgaggtgcccacactcggctcccgaggatggataatcgtctggttacagactgggaatgtaggcctggtgtcacagcttccaacctcatgggatgctggaaatctggattttctttttttctaagtgaaatgttccaacttctaaaacattgtgtgagccaaacaaaacatgcctccagggcgcacctgggccacaggctgccagtgcatgtgtgatctctgctctgtgctcccatttactactgcagctcagcctcgctgctttcaaggggaaaagggtctttatccttaaccctagaagctggcaggagtttggtgggatgattatgtgagagcgaggggttggtttcactgcagacctctgtaagggagctttgtggtgagtcctggaacatctggtttgagaggatgatttgtgtatttttcctcttgcctataagttaaagtctggcaaaaccccatttgctttagactggatacccccttggaacacacgcggtgaaacccagtgtccacagtgtctctccatggtcagggaccactttggattttatagcagcttagtgtggctttagtgctgagatgctgtaaaagagcatttccagttcttctaaaatatcatcatcatcatcatcatcatcatcatttttattgttctgcacaaacaccatcataatatttaacagaaatgagaaaaggattcagccacaaatgttactcatcagctaaaaagttcttactttttttttttttttttttggatttctctccaagtcgagtatgagctgaggactgttttacgtaatggcagttctaagcagatccatttgcagactgccttattttcctttgctttatatcatgtgtgtttttccacgtggccaaaaaaaatcctaacaatgccgagcacttcctaatatcttgttaaaaagacacatcaaataatttacgtaactgttccctggtggccagatatttttcattttttctgactttcaagtattgtaaataatgtataatgagcttgtgcttgtagctttccctttcttccggctgacttccagctgacttccttggaataaattcccggaagttttataccaaaagatggcatgagtatgtttacagttcttcacagagttctttctaaaaactttatctatctatctatctatctatctatctatctatctatctatctatctatataaacaggaatgtataactgtggtttccctgcaacgctggcagctttatgtatgatttttctgcatgcttccaatttaagaggtataaaatagtccttcgatgtggtttttattttgcctttctttgactgtgaatgaccttggccatttcctcatatttttgtggttattgtatttgcacttgcacaccttgtctctctagcttttgcctcttttttttttcctgttgggatctttattgatttattttatgagttcttggcagagtagggatagtaacccttgacatgctttttctgctgtaattatccccctatcctcgggttttttgttttgttttgttttgttttttggcagtttgggtttgttatgtagggctggttgcctttttgattctgtgtatgtcatatatagggaagttcaagaggggccgggcgtggtggctcacgactggaatcccagcactttgggaggccgaggcaggtggatcgcctgaggtcgggagtttgagaccagcctggccaacatggtgaaaccatgtctctactaaaaatacaaaattaaccacatgtggtggcgcatgcctgcaatcccagccactccggaggctgaggccggagaatcgcatgaacctgggaggtggaggttgtggtgagccgagatcgcgccattgcactccagcctggacaacaagagtgaaactccgtctcaaaataataataataataataagttcaagaggaagagggtggagaagtaggggcatgtgtgtgatccccccaagttatcggtgtgactccatcctgccccataagcacccccagggctgcccgaggcctggctgccagtactcccgtatcctgcaccgcagtgggacacacactcctgagcatttccatagacttgagggtccccccatctgcgtcaagaaagcctccgagctctgggtgcagaggagggagagcagtgctgcagtgttctgtatatgaagccctaagctggtcccaactgaactgcatcagggcaggcacggaggaggtcagtgtcggccacacaccccactctgctattgaacagagcttcccaaccgccccatcatcaagcacatagacagttacatccatatggaaagggggtaaagagagatgccactgaatgctggcatcaatggcctggggacaggtggggcctgaggggacacatcccagcaagtctgtgtccactcacaggtgagctgggaagctctgccctgaagacgcacttggctttagcacatcaagatgacagataccaggtttctcttcaaggcccttacattttctctaacatacccctcaaggtccccccaactcgtgctcactgcctgatcccaaagccacccccacagtttgaggatttcattaccccggcaacccacttcaaatatcaaaatgtgaattcgttttctagtaaaatacctccaagtttaatggcttaaaacaaaatgtttattactgtgggacaggaattcagggatagtgtagtctggcagttcttgctcagtctcacggggtttcaggaagttgcagcccggatggtggctggggctgcagtcccctgagggctggacttgcaaggggactggctcatgggtgggtggtttggtgctgattgttggtgggaaacgtgagtttctccccacatgagtctcttatgtgtccttacaacacggcagctggcttcccccagagaaagtgatgcaaaagaactggtggagccatacgctctcacctcccccgtacgccctcacctcccccgtacgccctcccctcccctcccccgtacgccctcccctcccccgtacgccctcccctcccccgtacgccctcccctcccctcccccgtacgccctcccctcccccgtacgccctcacctcccccgtacgccctcccctcccctcccccgtacgccctcccctcccccgtacgccctcacctccgccatacgctctcacctcccccatacgctctcactcaccctcacctctgccatacgctgtcccctccgccatatgctgtcaccgccaccatacattattggtcccccacacaagctctggttcacggtgggaggaggctgcacaaacgcacgaattccaagagatgagcctcactggggacccttttgaaggctgttatgagctaacttatgtcctccccaaattcatatactgaagtcctaactcccggtacctcagaacgtgaccttatttggggatagggtctttaaagagataattaagttttatatatatatatattttttgagaccacgtctcactctgtcgcccaggctggagtgcagtggctcgatctcagctcactgcaacctccgcctcccaggttcaagcaattctcctgcctcagcctcccaagtagttgggactacaggcacgcaccaccaagtcccactaatatttttgtatttttagtaaagacggggtttcaccatgttggtcaggctggtctcgaactcctgacctcaggtgatcctcctgcctcggcctcccaaagtgctgggatttcaggcatgagccaccgtgcccagcctgatgtctaatcttgaaggagactgacccaaagtcttttctgaaagatcttacagcaggtggggtccatcagaatttatgcctcatccggcagaagagaaactgaaaggaagacatgaaagtgaccatcactggtgaccaatgaacaccagcaaaacagcattttcacatgagacaggagtgagcttttcccgaaggctgggcctgaggccgccaggcttcagaatgtgccccctgtctgggcatccactgtggtgcataatttcccgctgtggtttacattttccgggtgagctccagggattctgctatttccttaataagaagatgagaaaaaccacacaataggcctcaaaggctgggctaaggccactccgaggccaagtgtgggcaggcctggacttttcagccaaagatcgaggtgccagaggttcccactgccaagacagcggcacttaagcagccagccttattatctaaataaacacaggttggaaggagtaattaacttcagtttcactgttaagtaatagccaaaaagtaaaaatgtaaatggttgaatatcttgttatcacatgtattgggggtggagggcagtttgccagaaacagaaggtgcaggctgggagcggtggctcacgcctgtaatcccaacactttgggaggctgaggcgagtggattgcttgaggtcaggagttcgagaccagcttggtcaacatggggaaaccccatctctactaaaaatataaaaaatttaactgggcatggtggcgcatgtctgtaatcctagctactcgggaggctgaggcaggagaatcacttgaacctgggaggcggagattgcagtgagctgagatcgtgccactgcactccagcctgggcaacagagcaagactctgtccctgccctccccaaccccccagaaaaaagaagcagcagaaggtgcaaataaaatcagccttggagggaaataaccactaacaacaacaacaacaacagaatcctgcgaaccattcagagctcagtgtcaacaaagatacagtcagacctgaatcagacctgagttgtcttgggcctcttcctgtgggttctttcactctcactaaaataaattcttgcactcccagagtaactgaaaagtgcaaaagcaacccagtgcagtggttctttcctgtgatcccagcactttgggaggccaaggtgggaggatcacttgaggccaggagttcaagaccagcctgggcaacatagtgagacccctatatctacaaaaaaaatttaaaaatttagccaggcatggtggcacatacctgtagtcccagctactcttttttttttttcttcttctgttagccttaaggaatatggtcaggcatatatccttaaaactaagaaaatataggtttcccagggtgctctcatagaatttttgcagctgcatgccttggtaaactttttctggataagtttggcagtatgtattaaaagccttgatgtttggaataccctttaacaaagcaacctacttccaataattcctatggaaatatcatacttgtttgcaaatgttcagctgtaagattattctacatagcactgcttataatattaaaaaatagaaatcatctgaatgtctgacaaaagagtattataaatagggttggattcttacacaggaggctaaggtgggaggatcacttgagcccaggagttggaggctgtggtgagcaataatcgtgccactacattccagcctggttgacagagcaaggccctgtctcttaaaaaaaaaaaaaaggtaccgagttggtacattcataaaatgaaagacaatacaactctttaaaatattgcttatttaaaatgttcacaaatatactagtaaatgggaaagtgtagcatacaaagtagtatgtatgtgattccagcctgagcaacatggcaaaaccccatctctacaaacaatacaaaaattagctggatgtggtggcatgtcccaggctaggtgacagagccatggatagcatagtcccagctactcgggaggctaacgtgggaggattgcttaaggccagggagtcaaggctgcagtgaaccgtgtctgcgccactgcactctagcctgggcaatagagcaagaccttgtctcaaaaaactttttttgccggacacagtggctcacgcctataatcccagcactttgggaagccaagatgggtggatcacctgaggtcaggagtttgagaccagcctggctaacatggtgaaacctcgtctctactaaaaatacaaaaattagctggtcatggtggcagatgcctgtaatcccagctactcaggaggctgaggcaggagaataacttgaacccgggaggcagaggtcgcagtgtgctgagatcgtgccactgcacaccagcctgggcaacagagcaagtgccgtctcaaaaaaaaaaaaataaataaaaataaaataaaattatgtatgattccattgagagggaagaacatttacacacagaaaagtgactaggaagatattctttaaaggttaatagctttttttcttgatggtgggatttactagggctttttcccccagttttgggcctctctgtacttctaaaatgtgaacatgtatttactttgtaacaggaaaaaacgatactacttatgtttggaaacgttagacttctaagataaatttcacaattcagactatttgttcccaatgcaggtagcttatacagaaatcatatattccattctatgttcttttgaaacttaaggttttttctacttagggagaggaattcagtgaagaaggggctagttttaggccacttacatataaggattgtggtttagtagagaagaaacagaaccttttttttttttttttgactggtaaatgtgctcagctcaaaaccccaaataaaacaaagctcttaaagacaacaaaaatatcctcagtcaaccccgtgcagccacaagaaaaaaaaaaaaactagaagaaaagttaaaggatatgtctttactcctagataaacttttcatgacctctgggacaaattaagttatattaaaaaaagagtttattaaaatattctgaaaaaaatgcctctaagactctcactgttcaaaaactgtcttctatttagacataaatttcattctccttttaaagaaagatcattcgatactttcatttcaaagcattgttaagtcacaaaagcttgaaacgtaccttaaaatcgataagggagaataaaacaccttttttcaaccagccaaaaataccatcttggtgattctcctgccaatctttttttatttcctatatgcagatttggggcctgaatatttagttcataccacgctgtaccatagatgcttgttttcacttcaagggagcaaagagagcatgtaatttagactctaaattgacgaagtcccaaaggccttttcctaaagtaccatttcctacctgacgttaggtgccctgatgatgataatgctgattcacatgcgagggcgctggcattgttcccactgcccacaccactgcctttttaacaatcacatcatcccaggagccagctcccaggagtttctttgtccgagtgaggaaactgaggcttagcaaggtcacactttttgccgctgctctgttctgctgcccacagctgccacagatggtcttccgggaccttaaacacagatttttcacacaagcttagagacagctgaggagaacagcaaatgtttttgtgggcttaccttctgcagttgcctcgtacagacctcatagagatacagtgaaaaaagatattcctcatgctacacaggagggaaactgagtctcagtgagtttatcagataccaagtgctgggcaaacagtagtgagctcaccctcttcacagaagaactgaaccccttcacggttctccaatgagtagaagagtttccctgagacatgagcttcctgccttcccctacctgcccagtccctggggtacctcctcggaagcccagggctccctggaacataatttgatgttggtgctcttgcagaaggaactaccatttaatatttattgagtcggacactgtgttaatccatgagacccacatgcctcgaaccccagcagctgtcagcccaatgggagatccaggcacaaacaatgaacacagcacagcagaagcattgccactctcctctgaagggtcctgctccattcagcagccctgttcacggaacttcaccctcttgtgttctggaaccactgtcctgcccccttcagggtttgggggtggtcacatcccagtgttattccctttttttttttttttttttttggagacagagtcttgttgttgcccaggctggagtgcaatggcacgatcatagctcactgcagcctcaatcttccaactcaagcgatcctcctgtctcagccacccaagtagctgggactacaggcgcacaccatcatgcccagctacttttaattttgttttcagtagagacgaggtctagttttgttgcccaggctgatcttgaactcctgagttcaagcaatcctctcacctcagcctcccaaaatgttgggattacagggatgagccaccacgcccggccctccctgccattcctacccctggggttctgcaccatcctttgggtgtgccatgtcctcatcccattcccacctttgcaaatggtctatttattaagccctgatttgaatgtgggtggcctgtctggcgcccgaatgtgcagcagtgactattcctgctatactggttgagctaaacttgcccttcacaaagacagacttgacgtttctggcatttggtatagacaggcacttaaaacattctcttaaagctcaatagacttcttgacttgctgtgtttactcttcattcatgaagacccgccagagtagctccagcaagccactcctttagactggagtactccactcccaggcagtcaggggaaagatggatttattccaagcccctagtgagtggctgggaagagctgatccaggaaccagacagaaggatggcagcttcactgcttcctaatgcccttggagcatcctttctcagcatagattcgatctcacagatcaggcacccctacaaaataacacattctaaagccagagatgtgggatgtttgcattatgtcatgttccaggctgtccatttcagaccatgaattcattcattaagcacttaattgttgagtgcctactgtgtgcccagcacctgattctttttatcaggcttgtggaatggtaccttagcaaaataagtccgaaccttcatggatataagacgagatcaggtgcattcagggtggtatggccgtagacgtccttcatgaatatattcaaatcaagtgcttttatgataatgttcctcactgtttatgtgtgtgtgtgtgtgtgtgtgtgtgtgtgtgtgtgtatttaaatatatttaaattgtccttccctcaagggcattgactttccaattttttagtggttagccatagatcattcctttcaactggaccccttcacggttctccaatgagtagaagagtttccctgagacatgagcttcctactttcctctacctgcccagtccccagggtacctcctccaaaccccagggttccctggaacatagttcgatgttgatgctcttgcagaaggaactaccatttaatatttcttggggtggaccaggcgcagtggctgacacctgtaatcccagcactttgggaggccgaggtgggtggatcaccttagggtcaagggctggagaccagcctgaccaagatggtgaaaccccatctctactaaaattacaaaaattagccaggcgcagtggcgtgtgcctgtaatcccagctacttgggaggctgaggcaggagaattgcttgaacccaggaggcggaggttgcagtgagccgagatcatgccaatgcgctccagcctgggcgacaaagagagactccatctcaaaaaaaaaaaaaaaatttattggggcggacactgtgctaactcatgcaactcacatgtgtcacccggggttctgtcaaccttttaagttacctgggctgtgaattcctcccctacttagagactcttgcttctttctctggcccctttttctcagcagatgtgttggtctgtgatttctaccctaatctctcttctggacaggcacctttggcctccctaagacccagtgagctccctcgactcacccccacccactgtgtgtgcttctgtctgtccgccgagcagccacgccactggaggaagttccggcctctgccatctccatagccattacgtccccactcacccacagggaggggctggcctgtgccagaccacagaaacttccttgtttgccgatttttttttttactgcacaagcattgttaatgtgttctcccttccaaatccttccagagcccaacccacactctcccttggcccattctagaagcgtcaaacatattagacgcatgcgtcttcctctgtagttgacattctcctcccctgactgtccaccctcttgttttcctccaagagggccacgtctttcagatgctgcaactggtcttgcacacctgaaactcacctgatgttgatcactctctttttttttgaaatagtctcactctgtcacacaggctggagtgcaatggcgcaatctcgcctcactgcagcctccacttcccaggttcaagcgactctccagagtggctaggattacaggcgtgcaccaccacacctggctaattttttgtatttttagtagaggtgaggtttcgccatgttggccaggctggtctcgaactcctgacctcaggtgatccacccgccttccaaagtgctgggattacaggcgtgagccaccgtgcctggccactccctttttatttttttcattttgtttttcttctttcatggagcccataggtttcttctctccttaagaaccttctctctctaatccccttgtcctggctcctcatgggccggctcctcaagcagactcagaatctagattccttaatttcttgttcaccatggcccagacttgtcttctctctcttgccaaattgtttgagttcctgattctcgcaataccttttcccactcttgtctaagtggagacattatgtttaagggcacagtctttaatgtcaactggattgaggttctagggcacacactaccaccaaacactgagacctaagtcaagttacatagccttgccaagccttctgcatttgtcagggcaattaatgtaactgttacagccactcagtggcttaacccagtaaaggtttatttcttggtcatatcacagtccagtgaggcttgggtggttttcctaggcagctcgcttccagtgacccagggatccaggcctcttccaccttgtaaggtttcggcataaacagtcaaaggacatcatcagagatatacttttagaagttggctctggcagcattgtttgaaccaatcgccatgagcagacaaaggaagaaagagtggatgcggagctattgatcttactgttgttcttttttttctttcttgagaaggagtttcactcttgttgcccaggctggagtgcagtggcatgatcttggcttactgcaacctccacttcccaggttcaagcgattctcctgcctcaacctcccaagtagctgggactacaggtgtgtgccaccacacccagttaatttttgtatttttagtagagatgggggtttcaacatgttggccaggctggtcttgaactcctgacctcaggtgatctgcctgcctcagccccgcaaagtgctgggattacaggcgtgagccaccgcacccggcccttactgttgttcttgactaacttctccctctctctgtgttcaagtttttaccaggtattactgcttcctctatgcccctgtgaggtatttctgactctaaatgcccaccaatctatatttttaaatttcctataatgctattattagctgattccttgctgccaacatctgtggtctcatttaatcctaaaatttctggaagaaacactttcttggaaaaaaggccttaatagtccatttttacctttaaattctttaatatatttgacatactcaaaataatatgtgtaacacttatgtaggttgtaaaaggagaataatatagtgcattacaccccacagaactagaatcctacaaataacttggatctacttatgtttttctcctctgtcctagccctgtccctttcagtggtaaatgctatgtagagatttgtatttatacaaatatgttacacatatacttttaaataactgtattatttagttttttggctaataaaaatggtgttgaggtattgtaatataataagaaatatatatttttgtcttcatttggctcctggccagagatcctaaaacctttgtaatttcctaagttataagtgcaatcagaacatcttttgttataatatttagattttgtcctgggctcctgaaatagctccagaatgatgaagatgaaaggaacgtcttttgttattcattaaaattagctccttttaaccacacctgagtttacgtagatgaatgaattttggaaagcccctaatgatggggggctggttgtcaagggaatggatcatgtgactagagggctggaacttaaacctcacacccaccccctatctccccaagctggagagagaggctggaggttgttgggtccatcaccaatggtcaatgacttaatcaaccatgcctatatcatgagacctccataaaagccctcaacaatggggctcagagacctttcagctcaaggactccatggagatgctcagtgggtagaacctttaggccagtggcagcgactcacatccctgtattttgggaggccaaggcaggtggatcacctgaagtcagaagttcaagaccagcctggccaacatggtgaaaacccatatctactaaaaatacaaaaaattagctgggcatggtggcaggcgcctgtaatcccagctactcgggaagctgagacagagaattgctcgaatccaggaggcagaggttgcaatgagccaaaatcgcgccattgccctccagtctgggggacagagtgagactccatctcaaaaaaaaaaaaaaagagagagtagaacccccagcaagggcatgggagctccatgccccgtccccaaaccttgccgtgtgcatctctaacattcggctcctcctgagttgtgtccttttataataactaataatcttgtaagtaaactgttttcctgagttctgtaagccagtcttgcaaattctggaacccaagaagaacccctgatttataggtggtcagtcagaggcccaggcttgcgattggcatctgatgaggggctggggggtagtcttgtgggactgggcccttagcctgtggtatctgtactaactccaggtagtcagtgtaagttttcagcataaacaatcaaaggacatcatcagagattaattgcaagaaaatattctcaaaccttatatctgataaggggttaatattcaaatatgcaaggaacttatacaactcaactgtaaaaagcaaataactcagttaaaaagagggcaaaggacctgaatagacatttctccaagaaagacataaaaatttagataaattgtaggacacacagttggtattttcaggaaatggagaattatttcctttaggtctatacccagaagagggattgctgggtcatatagtagctctatttttaatttctttaggaaccttcatgctcttttccataatgcctgcaccaatctacattcccaccaatagtgcagatgggtttccttttctccacaccctctccaaacacttgttatttcttgtctttttattagaaaccaccctaacaggtgtgagatggtatcttgttgtggttttgatttgcatttctctgacaattagtgatgttgggcacctttccatatagctgttggcctttttttttttttcttgagatggagtcttgctctgttgcccaggctggagtgcagtggtgcaatctcagctcactgcaacctccgcctccccggttcaagcaattctcctgcttcagcctccctagtagctgggattacaggcacacgccaccacacctggctaatatttgtgtttttagtagagacagggtttcaccatgttggccaggctggtctcgaactcctgaccccaggtgatccgcccaccttggcctcccaaagtgctgggattataggcgtgagcaccatgccaggcctgttggccatttttatgtctttcttggagaaatgtctatccaggtcctttgcccactttttaactgagttatttgcttttttcagttgagttgtataagttccttatatatttgaatattaaccccttatcagatataagctttgagaatattttctcgcaatctgtaggctgctttttcattgtgttgattgtttcctttattgtgcagaagctttttagcttgatgtggtcccacgtgtttatttttgcatttggtgtcctagctaataaatcattgccaagaccaaggtcaaggagttttccccctgggatttcttctaggagttttatggtttccggtcttatatttggtctttaatccattttgtgttgatttttgcatatggtggaagatagggatcaatttcattctttttcatgtggatatttaatttttccaaaaccccaacaccatttattgaaaagactatcctttccccttaatgtcttcttggcccccttgttgaaaagttagttgatggtatatccttgggtttatttctaggctttctattctgttccattagtctatgtgtctgcctctatgccagtatcatactgttttgattactatagctttgtagtagattttgtgagtaagtagtgtgatgcttccagttttgttatttttgctcaagattgctttggctgttcatggtcttttgcagttccatatgaatttcagcattgttttttctatttctgtggaaaatgtcgttggaattttatagggattgcattgagcctgtagatcactttgggcagtatgaacactgtaaccatataaattcttccagtccataagcatgggataccttttcatttatctgtgtcttgctcaatttctttcatcaatgtgtgtgtagatttctgtgtgcagatctttcacctctttggttaaatttattcctaggtaattttttatgccattgtaaatgggatctcggctcaccgcaacctctgcctcctgggttcaagtgattcttctgcctcagcctcctgagtaactgggattacaggcgtgtgccaccgcgcctggctaatttttgtatttttttagtagagatggggtttcaccacattggccaggctggtcttgaactcctgacctcaggcgattcacctgccttggccttccaaagtgctgggattacagacatgagccaccatgcccggcctaccaccttgaccatttctaagtgtacagtttggtcgtgttaagtatattcatattgttgtgcaaccaatctccagaattttttcatcttgacaatcgcaactcaaaacccataaaacaactccccattgctccctcccttagctcctggcacccaccattccactttctgtctctgtggatttcactactctaggtccatcatataagtggaatcacacagtatttgtctttttgtgactggcttacttcacttagcataatgtcttcaaggttcatccaagttgtagtatgtgtcagttcttaggagtcggacttggtcagatgggtggtgggggatcttaagcaggcagggagtgatgagattagaaagaccacagtggagggcaaaggggagagaaccatttgaaggggagaaaatggaaggaaggagtccagtgagtcctttttaaggctgaatgatactccatcctatgtatataccacattttatttatccattcatccatcaaaggacacttgagttgcttccacctcttggctgttgtgaatatgccactatgaacatggatgtgaagccatggtgtttttttcccttgcttctggttccattttagtctccttcttgaatctcacagctgtgggttctcatgcactcatgtacctcactgctagtgaatccttctcctttcctcctggataatccacttcaagactttcttcccgtgagcagctagctccaatgcctgctagcaaaggcaccaggagtaggctccaagagccaaggaggagcttcagaagggatggaggttataaccttccctttgttcattcgtcccataattctttgagcatttactgagcatcaggaccagcataagtgctgggagcaggagctccctgtctagtctggatagcgacaaatgagcaaataagtagagccatgaggtgagagcaatacacagaacaggagaggcagagagaaggaaaccactgactgccgcctgggagatggtacaactgagaagacaggggagaaggaagtatttcctagcaggcagaggagcatgtgcaaagataaagagatgtcaagagtcacagcctggctttctggggctgcagtgagacctgcaggctgcgacacaggctggggtgggagaataacggctgtgaaggagctaggaaggtagaaaaggcaagtcatatggggccttgtgcacagttctgaggagtcggacttggtcagatggggggttggggatcttaagcaggcaggaagtgatgagattagaaggggcacagtgggccgggcacggtggctcacgcctgtaatcccagcactttgggcggccgaggcgggtggatcaccgggggtcaggagttcgagaccagcctggccaacatggtgaaaccccgtctctactaaaaatacaaaaattagccgggcatggtggcaggcgcctgtaagctacttggtcggctggggcaagagaattggttgaacctgggaggcagagattgcagtgagccaagactgcaccactgcactccagactgggtgacagagcgagactctgtcaaaaaaaaaaaaaaaaaaaaaaaaagcacagtggagggcaaagagagaaccatttgaagggaagaaaatggagggagggagtccagttactagacttgctgcaaaactgacagggctggaactgaggctatggcaggagagtaggaggagatgataggtgcagacgtgtggagtcaaaggtggctggaaagagtaaagacaatcattgcacatggcggagtgccggagtggccagcgctgaaggcagagatcctggcctcggctctcagtggtttggtagtggcagggatggacttgggactgaatggagtgtgcagaaaggagaagagagcccagacccagtgcattttgcagggccctgtgcaaaatgaaaatgcaaagccccttgttcaaaaatatatcagaatttccaccaggcacaggaatgagcttactctgggtgggcaggcctgcagagggcaccaggatagaggaatcagagaccaccagggtgatgagcaccagggagctgaggtcagtgagaaatccctcaataggggcatttaggcaccggaagttccagagatagggaaggattaggatcacccctcatctcttggatgggatggtgataagtccatgtgatctcctcaaagggatcagtttcggggtgtgtgtgggacaggggcatattgaggaggggaggatacaggatgggaggagagatgcaggggaggcatagagatcctttctagaaggctgactgaaggaaaagcataagtctggagagaggtcctgggaactggggagagcagtttttgttgttagagggtagaggagtttgtcatctataagacgtgagcagacatgcacaggactttgtgtggctggggtccctgcccctgtgccttcatactctccctgacctatgcttcttcacagcaccagcccttggcctctctgggcatgaaccccccacaggcatctccagatttgagccttttcttcaaaatctcggcccacctcaaatgcaggacagttttcttttgtttttttttttaatgactttatgatcgtgtccttcaaactgcctactcctaacaacttccctcatctctcagtagcaccactgtttccccagccctgcagcttaagatctgaaaccatccttggtcggtccctcacccaccctttcatggagactggggtagtggggctcagagatcaacctgcaggccccgctcttctctagctgtgtgaggttactgaacctctctgtgtctgctgtctcagccacaaaattgatgtgtgtgtgtgtgtgcatgcacaagtgtgtgtattacaaacagcctatctcataaataattatctgtatttattgggctcctacagtgggccaggtgtgggaactagatgatgaccaaaacaaacatagtttctcactatacaagtgctgagagcagtggctgacatcatgctacctgttatattataagtgaatggaactttgcaaagtctctaaaattctctcctcttccattccttgctctttaagcctgtaactcccctcaatgtacattcttaaaattgcttccaaactgctctccttgcctttggttcccgtttctctcccagggaatcctctacactgtcccctaaagacaatagtgtcaggcatttctttaggcttcctgttgcttgcagagtaaagtctgaattctttagctaagcctttgaaagtgtctctgtcttgttccagttcacatttcctactcattcgctgtggtcgccccgcctactcccgcctttccagcctgtggccagcccctgcaggggctcctagcccactgccttagtgttcatgctttctctcttgcctgcctctacccaatttctgctctttctttcatgatccagcccctctgctcccacgcacagcgatctctcccgcctctgacctagcacctcttgtctgcaccacgtcctgctgacagtgattcactgtttccactatcagacaccagctctcacatgtgtgttttgactctctagctctattgcaaatcctgtgaaaggatgctttcatctgggtaaaaagcaaggtaggctttttatttatttatttatttatttatttatttatttatttatttatttgagacgcagtcttgcttggtcgcccaggctggagtgcagtggcacaatctcggctcactgtaacctctgcctcccaggttgaagcaattcttgtgcctcagcctcccgagtagctgggactacaggcacatgccaccacacccggctaatttttgtatttttagtagagatggggttttgccatgttggccaggttggtctcgaattcctgacctcaggtgatctgcctgcctccgcctcccaaagtgctaggattacaggcgtgagccactgtgcctggtcctctttttactgtttttttctgatggtacttagcacagtgcctcatccaccataggtgttcaactgatatttactgattttaatgatgttgtgccagggcaccgaaaaacaaatcttcatgtcaattagtttatttcattcattcattcatcagatatttacttgccttctacagtgggcgaggtgtgagaattagatgatgaacaaaacagaaatagtctctcctggagcttatgttcatgtagaggagattgattctcaaaataaacaaacaaataatatatttcaaagcatggtaaaggtcgtaaaagaaccaagaatcttcattcaatgttcttcatattttaaccagtgcaaaatgaaaatgcaaagccccttgttcaaaaatatatcagaattttgaccgggtgcggtggctcacacctgtaatcccagcactttgggaggccgaagcaggcaaatcactggaggtcaggagtttgagaccagccttgccaacatggtgaaaccccatctctactaaaaatacaaaaattagctgggcatagtggcatgcgcctgtagtcccagctactggggaggctgaggcaggagaattgcttgaagcagggaggcagaggttgcagtgactgagatcgtgccattgcactccagcctgggcgacagaacaagaatcagtttcaaaaaaaaaaaaaaattcaagatggcgccagcagagcattaaaaccagctctgggacttctaggacaggatcatgatgctggctctgcccatcttgggtgctttaatgagacagaaaataagcagagaaactctccatttgatttgaatccagctcagcatatttatttacagagaatgctgtaggctatgtggtggccctgtgtgggatgcaacctgaagttctgggtgtttcctgcctttcagattgcttgtcttactcagctttgcaagtcctatcccgaaggtgctatgggaagcagagatgcaaaatcatcgtcaacaatcaccattttggaagcccctgtttgccaggcgtgaaaaaatacctcactgtgacctacgcatgtggtaagaacacacccccgaccagctgcctgatgacactgcctcttttgggggagggtggtgaccatgtgaacggcaggagtttgcccagaacaagccaaacactgctcctcctgaagctgtttggtcatcccagatacccgagagccctttttttctttcttattcttgtttatgatattcatgtcagataagcaatagaattttctttggtcaaaatttgtgtaaaagcacctttagcaatcagattggcagccaatggggagggtggagaaggaacaaccaaataggggtaaactgatgtcactgagaccagtgattttcatctgggaaaatttattgggatgtcatgcgagttcacagtcgaattatgtgtctcctatttaaccttccagttctgcttttaggccctaaatgactaactctctgtactgccaacagctattttatctacatgcccacagtgttgagtcaacagatcaaatgcttaccctaaaacaataaaaattgttacacgacagcattactttgttttcctgatgtctttaaatgataaaatgaaatgccttcttcgtttagattctaatttcataaagccacgtaaaagcaaatcagcagtttattattttctgaggatactgtggatttccagtgtgtaatcctaatgtgttgactgccttctttttgttggaaatgagcataaaagcaaatggaaagcaaagagcattataattgaagaacctgatacctattctcttggaaatcgctttttcccctgccaaacattcctagccattttatgtctgcaacagcttttttgagatataatccacagagcatacaattcacctgttacagcatacaaatcagtggtttttagtatatgcacagaattgtgctaccatcaccacaatcagtttaagaacattcgcatccccccaaaagaaaccctgtatcccttagcagtcagcccaccaaatccacccattcattacacctgccccatccccaggcaaccacccatctactttctgtctttatggatttgcctcttctagacatttcctagaaatggaatcatacaatgtgtggtgctttgtgtctggcttccttacttagcatctgttttcaaggttcgtacatgttgtagcatgtctcagtactttatttctttttgtggcatcataatattccattgcatccttagaattttatatcctgaactaaaaatgttgttctctgcaatatcaatgctgcaatagatatgatgaagtgactacataaatgtattaccaaaataatggcacccactcttacatcacaggagggatggctttacctgctctgtctttattcctgctgtcatgtctaagcaactctaagtagcatggggcccattttggctgaggttcccccagaggccaaaaaggtcactttgagtacatccttggatagctcctctggtagaatggaggacggtagactggacacgggtcacactgaggttccagtaacttcaggcctcttcatcagagtgttgaataagaagcagaactttagcctccaaataaggtgtagttttggccggggaccgggaaagctgagacactgctgggctggggccgccatagccctgggaacggagtatattctagtgaaaggagaccaggtgactggcatagtgacagctaaatctggagatatattcagagttgatgttggagggagtgagccagtttctttgtcttacttggcatttgaaggtgcaactaaaagaaacagaccaaatgtgcaggttggagatctcatctatggccaatttgtggttgctaataaagacatggaaccagagatggtctgtattgacagctatggatgagccaatggaaggaatgtcattggacaggatggtctgctttttaaagtgactgggcttcattagaaagctgttagctccagatcatgaaatcaaacaggaagtgggaaaactctatccactgaagatagtatttggaatgaatggaagagtatgggttaagggaaaaaccgtccagcagactttaattttggcaaatgttttagaagcttgtgaacacatgacattagatcaaagaaaacaaatctccagattggcagaaagttgatataggtggacttttttaatgggtccgttgagccaagaaaccatgggtttcctggggaaaacttttttcaggtgaacttctccccatttagttattcagaagacaaggtatgaaggtacatattatcttattggagtcctaattaaaatatttttataagtaaattactgattttcacccatgctcttgtgggagagaaaatcattacagaatcatgatgtatttttttattctgtacaataacatttactaaaacattttttttaaaggtgcagtttctagtgtgctttcaaggatgaggcaagaacagttcctacagctgaggctcttcttagctaattgtattagtccattttcacactgctgataaagacatacccgagactaggcaatttacaaaaaagggggtttaattggacttacagttccacatggctaggaggtctcacagtcatggcggaaggcaaggaggaacaagtcccatcttatgcggatggcggcaggcaaaaagagagttgtgcagagaaattctcattttttaaaccatcagatctcgtgagtccctttcactatcaagacaacagcccgggaaagacccgcccctaagattcaatcatctcccacagggtcctcccaccaggtccctcccacaacacgtgggaattatgagatttgggtggggacacagagccaaaccacatcactaatgctgagatgaaggtgagctttcagggcctgggggtcacatgtcccagttcaagcttttcttccttctgtcactcattcagcacattgctctttgtgtcaggagctgtgctgggtgccagggattttgtaataaacaaagagacacggccaggtgcggtggctcacgcctgtaatcccagcactttgggaggccgaggcgggcgcatcatctgaggtcaagagttcgagaccagcctggaaaacatggtgaaaccccatctctactaaaaatacaaaattatctgggcatgatggcgcatgcctgtaatcccagctacttgggaggctgtgacaaggagaatcacttgaacctgggaggcggagttggcagtgagctgagatctcgtcactgcttgggtgacaagggtgaaactctgtctcaaaaaaaaaaaaaaaaaagagacatggtcctgttttcatggggtgagcagttgagggagaaaggcaagcattaaccaaatagccagacacatcatcatgacctgttgtgacaaatgctattttagaaaagggcagaagactgtaacagtggagggggcctaatttagcttgggggtggtggtttaattcttccaaagagaaccatactgtagggtgaacactagggtatgcacactagctgcacactagctgcacactaggggccgagacgctgaggttgctgagtgggagaggaaaggtgttgatgaggaggaagatggccctggtttaaactgctgagaacagggtcctgcacacagtaggagctccatgaagagtggtccctagtgttttcaccaacatatctgaagtggagcaggacggtgatcaatcacaccccagtccccgacctcattcggaactagtttgaatcaaggagatgcaaaaatctgacaagtgtgttgacaacggtgattttaaaggtcctaaaagattctccagatatcagagccattttcacatagtagaagggcacattccctgcagtggcctgtgtcatacacagccaatttaaccttttcactgcctggttattctgcaaagtgcatcctagaatgcccttcccctctgagctcctctacaaaattctgattctttctcaaactgtaaagcctctggcatttgccaagagccaaggccctcctgaagccatagtttgagaacaagccaagaggcagacatgagaaagaagtaccactcctggcagggagagctgacacttcctaggattctgcatccttctcagggcccagaaatgaatgcgaggtaattaaagcagaaagcaatttgcagcagctgagctcagctctccggagctgccagggtcccaggatcagtggtgtgccccaaggacagccaagggacattcctcaaggccctggaaatcatcagccacatccagcaacttcaccgggcttccctggaaagtctcccttgctgctgatgggcatgaaggcgccagggcctcctgtacgtggaaaactcacaatctaggaatgtccggtggttgttgatcctgggacatccccagaagaatttagttaagccctctgagagaggaaacaaggttttcttgctgctgaagatgcctcacttgttcttttataaaaaagcagtgcaattgaatttgcagtttgttttggctttctttccatttcctgttgctacttctctgagatctcagctgggctgaggaacaaacaaaaataagcaattttatgcagcaggaatattcggtttccactcccttctcccagcctgcggcagtgtgcttggcctgcagaattcttgctctgccctctgtttcagcgggtgctgtcatctgccggctgctttgcctggggattctgacatcccagggcttattcttagggtcagttcagcagagtctgaaaccaccttcagaggagtcggtcacgctgccatcctctctgcatctttctgtagtcctttctgataatatttagcaaatcactttagcacagggtcttcgaattctttccagatttacgatggaaacacagaggcaaagagcttggggtagaaagcagaagagtaggtgctgggagagtttgatggtgggttttgagttggtcacagtcattttgctttactaagtccagggaagctcatcttcagagttaaccaccctatttttttttttttttttttttttttgagatagagtctttctctgtcacccaggctggagtgcagtggcacaatctcagctcagtgcaacctctgcctcctgggttcaagtgagcacatccggctaatttttgtatcttttagtagagatggggtttcgccatgttggccagcctgatcttgaactcctgacctcaagtgatccacctgcctcagcctcccaaagtgctagaattacaggcatgagccatcatgcccagcccagagttaaccactctattgaggtgttattttccttaaaattctattacatgtgaatacaatgcaatgatttttagtaaatttagagttgtgcaaccatcactaccctccagttttaaaacattttcacaatgccccgaagctcccttgtgcccatttgccgtcactgccccattcccacccccccggtcccagataaccacgcatcaactttctgtctctagatttgccttttctgaatattttgtacaaatggaattatgcaatggatggttttgtgtgtgtgtgtgcgtggttggcttctttaactgaatgtgatgtttcagaggttcatccatgttgtagcatgtatcatatcggtacttcactttttttttttggagatgaagtctcactctttcactcaggctggaatgcagtggtgcgctcttcgctcactgcaacctctgcctcccgtgttcaagcaaattctccctgctttagcctcccaagtagctgggattacagctgtgtgccaccatgcccagctaactttgtattttcagtacagacggggtttcatcatgttggccaggctggtctcgaactcctgacctcaagtaatctgtccacctcgacctcccgaagtgctaggattacaggtgtaagccaccatgctgggccttcattccgttttattatgaggtgtattctgctagatggatatatcatatcttgtttttattctccattttttttaatattgcaaaatgggcctaaaaccacctctctggagcatttgatgatcacatggataccatgggtttgtgtgtatatgtgtgtatttaacaggaagagtgagtgattcttgcactgatttggaaagtgattttaaaatcttatctacattgcatttaaaaatgtattaagagtccacattttaaaaatataccacgaatttaaaatatttcttttttggcttttagttcccaagaacatactcacagcgattgatccagccattgctaatctaaaaccttctttgaagcagaaagatggtgaatatggtaatttttatggcttactaccagcatttctctttaagtaaaggtaaacagcccctgggtgaccacagttgggcacaccttggttagaatggaaggggctgtcaggaggtgtgtttgaggtaccggtcctggtgataatagcgcttattatcggccaatagttgcaaatggtgaacaccattttattttgttttgacttttttaaaatcagaagtaggataaacctccccttcattctcctctcacttcctaaaaggaaaatcactttgaaaagacatctgctcagaagtaaatttgggcttcctgggttacacaatgagctttttgcaaagctgagcccattggaacctgcgtaggcgccagggccaactaggacctgagggcctctgtacctctgtacacaccaccttcctctttagtttccttcctcccttccttccttcctccctcccttccttcctctctccctccctctctctctctcgctcttttctttctttctttctttctttctttctttctttctttctttctttctttctttctttctttctttcttctttctttctttcttctgtctttctttctctctttctttctttccttactttttcttctttttctttggagtttcgctcttgtcgcccaggctggagtgcaatggcgcaatctccactcactgcaacctctgcctccgggttcaagcgattctcctgcctcagcctcccaagtagcagggattacaggcgtccaccaccacacctggctaatttttgtgtttttagtagagacggggtttcaccatgttagtcaggctggtcttgaactcctgacctcaggtgttctcctcgtctcggcctcccaaagtgctgggattacaggtgtgaaccaccgcacccggcccctccttagttttcacttggcttttgtaaatggggtggaggggtagggagttgagggggttgagcatttggattttcttatcaaatctagaatggaattcaaacccatggggtccctaatagaaactgcagagaccccgtagagcatctaagatgttaggctgtggtgagagttttgtcttgtgttacctttattatatgtattaggtctttcccccctaagtataaaagtaaagtatgtttgatatgaaaaccatatgaaagcacccctactccaaaagctcaaagaaaactattggtaatgttcttctgtgtccttctagctggccaccttggctttctggcaggctctgtgttccttagctcctcttctctttcttttaactaattaattaactattattattatgtttgtaaagacagggctttgccatgttgccctggctggtctcaaactcctgggctcaagcgatccacccacctcatcctcccaaggtgctgggattacaggcgtaagacaccgcacccagcttccacttatttttctaacagggttcccacccgatccataaacagcctggtccccctgcagtgggggcctgagagccaaccctgtgccgtctctcctcaaaggcatctgtcctgtctgacatggctaggagtcccccaagccatcaggttaccccatcacagacttgctaagctccatccagcagtgtaaccaggatttaaaagcagatttgccccacattttgctgttgtttccaaaaaaagtagcccaatacaacctccctctgtaatggaggcttgttttatctctggccacacagcagacatcaaatccatgcttaaagtgaaatattattggccgggagcagtggctcacgcctgttatcccaacactttgggaggccgaggcgggcagatcacctgaggtaaggagttcgagaccaacctggccaacatggtgaagccccatctctaataaaaatacaaaaatttgctgggcatggtggcacgtgcctgtaatcccagctactcaggaggctgaggcaggagaattgcttgaaaccaggaggtagatggttgcagtgagccaagattgtgccattgcactccagcctgggcaacaagagtgaaactccatctcaaaaataaataaataaataaaataaagcgagatattattaagcctctgaggggtgtgatgaatgtcactgtctttaggatgggaaaatccacttattcccttccacagtggagtggaagaccagcacctgaagttggaaccaacacttaaaacaatttctaatcctttttgtactttaatattgtcggggactgcttactatttaataagtgctcttcctgggttaatcttctgtaatttagccagaggcccatttgtttgatttctgtgacttttaattattccggcggtccctggggtaggagcagcaggggtgtcttagaataggcgtactatgaacagctgtgattaattggtcttgcatttttcatgaaacaggtataaacttcgacccaagcggatcgaaggttctgaggaaagatggaattcttgttagcaactctctggcagcctttgcttacattagaggtaggtcaatgaatcaaagcttcctagaatgctgatggatttactaaagtcttgttaataaatgtgctgttcaattatagcactcagataactaaaggacgatgacttcaagtttaacatgccaaccaccacttctaagattcagaaacacagaggcctgagttcaggcacagttgtaaccaggcagtcagcaagagaaccacataaacagacaaagtcacactatttaggagttgagctccacagatatttttcgcttttgaaaagtagaaacccgaggaatgcatttcccagctctaaaattcgggaaggaactaggattattgaattccagccctgactggaagaaaaatgagccagaaggtcacttagtaaacaagacagatcatgccccatgaagacagagccactttctgggtcatgagtgttattcctaatagttgtcaaggattcccttgttagtcttccccatgaggatcaatcagactcagccctcatgaattagcagagccagaaggcttataccaaggccggccacaccgcggggacctcttcattgaggggaaggtatgtacaatttttcctcaccaccctctctgcttatcttaagatagaacacattttggaatgccatctgcaagtttcagcaatgcctgcctatgttcagagagacaaaaaccagagaccttcagtaaaatacatgttaatataatacataacagtattgctattcaaggcctgcaaagatgggctatttggggtaagcctgtctcagaggaaaatagaggcttagggaatgtatttgtctgttctcatgctattaataaagacatacctgaggctgggtaatttataaaggaaagaggtttaatggactcacagttccacatggttagggaggcctaacaatctcggtggaaggtgaatgaggagcaaagtcacgtcttacttggtagcaggcaagagagcttgtgcaggggaactcccctttataaaaccatcagatctcgtgagacttattcactatcaccagaacagcatgggaaagacccaccccatgattcaattacctcccaccatgtccctcccatgacacatgtggattatgggggctataattcaagatgagatttgggtggggacacagccaaaccatattggggaatgatctcaatacatgagatgcaaagttcagtcttggggtcccctgctgttctattgtcctcctgcgtcaggattcctcctgtgtgtgtgttgtgtggttgatggtttcttctgtgggtcctctcttttctagccaccttctcattttcatgtcttgctgttcctgatcattgtcaatgttaagaactgtaaggatttttactgtcagaaatatccccatatttacaaagtccttggggagcttcttggagaaaagccatcatgaaaatcctccagacagagaataacgattgaaggggaacgagaccgacattgcgctcagtgagctgtggccttgctgtgtgctttaccccaactaccttgtccgttcctctcaacaactgccttagccagcccagctgccataacaaagtacccgagaccagatggcctaaataacagacattgattttctcaccgttctggaggccagaatttcatgatcaaagtatccaccaatcactttccggtaagggctctcttcctgggttgtggacagcagccttcttgcttgtcctcacatggcagagagggggagagacagagacagagacatctcttctttttataaaaccaccaattctatcagattaggattccccccttatggcctcctttaaccttaattagctcctaatgagtgaactgggggcaacacaattcagtccatagcaacaaccctgagagatgggactctgatcccctgttctgcacttgaagccggtggtcagaggagttgagccatttgcctgaggacaccatggacagcggcagggccaggattcaggctcagctaatacaaggcttgcactccagctactctgaattttgagggatgcaaccacctccccactctgatcctgagttgtctaaattagctttcctccatctctttctatccttttatgtgattgtcattcccagaaaccacaggatagagatattcgtttagtgactatctctcctgctagtggctcagctccacagggtcaggtgccttgtcatcttattttgtgtggtatccctgtatctaggatgcggtgctggtacagaacaggtgcacagtcagtagttaaggaacaactgaatgatgactgctgatatgggcttatgagctttttcctgtgctttattgtcatccaatatttgctatttataagatgtccatttttttaaaatgtaaggacttgatgagctgttatttgattttattgaggggtgtttggtgacatttatcttagcaaaccatgaccacgcctccatataatgtccaagagaaagagtctctaaatgcactgtgttggatgttagctaaatgaaatcaccacaagaagctcgtgactcaaatcacagaggctcacaaagccctagtagaacaggtgcctctgggcttgcctgtgggttttcttggtgtgtctatgtcgctgtctgggtggccactctagaggtgggaagcatgcagtgcatgctcaggggtctgcaggccagtgtgccacagaggtgcatgtggacatcaggctgggtcatttcgacccaaacaggcagtggccaccagccaatgtcacacagtgctgagctccatcctcactgctgctggagagaggtgcccagacaactctcagtcgcatccccggccccactgtggggatgtgacccacgggatgagctggggtctctaggcacccccaaagcaggagcagctgggagccaagagtgtgagcagggcagtttccagcccaaaccacccaaataggcggcaaatggagtgaatccaaaagtacatttcccaggtcaggctgcaagtagctttgacacagtagtgcagtccagtgtacatggggacaaggagaagagaaaccaaaatcgagaggtttgtcccctgatattaaagcacagaggttggcagaagggacaggaggatgtccaagggtccctggtgaagcatctcctggggtcatctgaatgatctgtgagatggtttccccaacattgaaaaagcttcttaggtatgtttgaatttactgtcatttcaataatacagacttactccccgaattcattctagaatcaagatcatgactctaaggaagctcatagaaaaacattggaaattagagaaatggaaaaggagtggtgtgtgtgtgtgcatgtgtgtgtgcatgtgtgcatgtgcgtctgtgagcatgtgcatgtgtgtgtatgtgtgcacgtgtgtgtgcataggtgtctatgcgtgtgcgtgtgtgcatgtgtgcatgtgtgtatgcgtctgtgtgcgtgtgtctgtatctgtgtgcatgtgtctctgtgtgtgcatgtgtgcgtctgtatgtatgcgtgtttttgtgtgtgcatgtgtatatgtgtgtgcatgtgtgtttctatgtgtacatgtgtgtacatgcgtatctgtgtgtgcatgggtttgcaggtgtgcctgtgtgtgcatgcatgtgtatctgtgtgcatgtgtgcatgcgtatgtgcacgtgtgtgtgcatgtgtgtgcatacgtgtatctgcatgtgcatatgtgtttgcgtgtgtgtgcatgtatgtgtatctctgtgcatatgtgtatctctgtgtgcatgtatgtatgtgtgttgcatgtgtgtgcatgtgtctgtatgcttgtgcgtgtgtgccgtcatgtgtgtgcatgtgtatctgtgcatgtgtgtatctgtgtgtgtgcgtgtgtgcctgtatgtgtatctgtatgtgtgtttgtgtgtgtgtgtatctgtatgtgtgcctgcatgtgtgtgtgtgggtgcgtgtgtgtacgcatgcatgtgtgtgcatgcacatgtgcgtgtgtatctgtgtgtgtaagtgtgtgttggaagttcttagcaaagcagtgtaatagctggctcagcatgagccattgtcccctggcagattgtgcccaaggggacttacgtatttagacagtcttgcatgagaatatgacctctcctattccacataattactgtttcattgacatctggctttgggtgtttacctcatatgtgcctgcaggcatgccttttgtggcctaatatttccgtcactgcccctgcccccttgggacagtgacagatatgtcatcagcctctggcaggccctgctgtgggcttctggggcgcaggggtaaggaagctgggcagaagggacaggcttgcagcctgggatgtcctgttttgggaggcataattgtttcataagggaggaactctagggccacagataagcttatactgaaagagaaacacaaaaacacgctccagagtcagagctatgtgattcccccaccagggagaatcactggaaatcagcaccaccttgtcacggagatatggattcggatgtgttcccacggtctccaatctctagttccatgatagaaggtttctgtcacacccctaagtgctgtcagaccagcacttggtatgctttgtgctttcttctggacaactctcgggccctgactgctgcctcgatcctctcaacagcaatagggccccaacagggggaacgctcgccatggcctctgggtgtcttatctggacacgaatgagctggagcgtgcatttgccccaagtcaggatctaagggtggaaaggagccttaaaggccataggtcccccttcagaggctcccatgggcatgcaacagctgatcaaattaaagtcattcactccagctggggatgaaccaaggctaaatttagaacaatgccagcagaaacacagtgtgaagattctgttcaatcacaaggaaaactttgtttttccagaatacggaataggaaaaggagccacaaaagtataaagtagtccaagtgattctagagaacagttgacattcccttagtgtaaagcctgggaccatggagagagccctggcctgagcttggggtcctagccaagtggtggctttgcacaagtgacttggctacaacaagaggggttggaccagctcatcactaagattccagctgaccaacatctggtgagtttgtatcttcaaactagttgattcagatgactaggaagccttgttcccatggacttgccaagcattgcccatattgtccatctctggtggctgcatctcagcagagttgatgcagacttgccttaaagagcgctcacttagcaggaggcaggcctaggccaagaggcacctggagtcttatgggagagaagctctcctggcaggagaacccagacacccacctcccaggagaagaggagagggaaaaaaagggagctgatttatggagccccatccccaggcgccaagctgagtgcttaaatccacaattccctccttttatgcactcagcaaatattttcataatgcccactctgtgccagggatggcactggggatttggcaaagagcaagatggttccagcccctgccctcaggaagcttgcattctaggtggagagaaaggatggcacccactcagcgagtgagtgacgattgtaagttgggctgtgaagaaaacattcaagatactctgagactaaatgacaggggacctggctaggctaaggcagggggaggtatctagtagtgctggatgaagagggaggaaagaactttccaggctaacagaagagcacatgcagaaaaaccagggtgtgcaggtatctgatgtgtcacgagtgaggaatggcaggctagagcggggagcagagaggaagcggaagttctcgggagttgaacttggggagggtgacaagggccaggtcatagccggcttcctaggctgtggtcaggagttgacttttattgcaaaagtaattgcgatttccgacattcctttttttttttttttttttttgaaacagagtctttcttggttacccaggttggagtgcagtggtgtgtgatcttggctcactgcaacctccacctcccaggttcaagccattctcctgcctcagcctcccaagtagctgggactacaggcgcacgccaccacccctggctaattttaatttttgtatttttagtagagatggggtttcatcatgttggccaggctgatctcaaactcctgacctcaagtgatccgcccacctcagcctcccaaactgctggaattacaggtgtgagccaccactcccggccgatttccgccattacttttgcaccaacctaatagcttaggagagggaagaggccatctataagttttaagtcaggcagtgatgtgacccaatgtgtgtttcttaaagattatagaggccatgcaggaaagatggtttatatatggtctgtggtcgcttttgcactacaatagcagagctgttatatttgcaacagagaccatatggcccataaacctgcaatagttcctatccggccattcactagaaaaggcgggcaagagaggaggatggggaccaggtgcctgcagggaagatggagcagaacagtgtttcatccctggttttcagataatttcacaaggttgaaagacatcttaatgaaagtgaaagtacaaggcacttaccaggagatattcacaccagatgccatggctcacacctgtaatcccagcacttggggaggccaaggcaggaggatcactttcagccaggagtttaagaccagcccgggcaacaaagtcagacctcatctttacaaaaaaatataataaaaagttagctaggcatggtagtacatgcctgtagtcccagcttctaaggaggctgaggtgagaagattgtttgagcccaggaattcaaggctgcagcaggctatgattgtgccactgcactccagcctgggtgacaaagggagactctctctctctccctctctctctctctatctatatgtatacacaatatatttgctgtcaaaggattatcatcaagagtctatagaaaatatacacatccttggactaggcacggtggctcacgcctgtaatcccagcactttgggaagctgaggcgggcagatcacctgaggtcaggagttcaagaccagcctggccaacatggcaaaccccgtctctactaaaaatacaaaaattagctggtgtgatggcatgcacctgtaatcccagctacttgggaggctgaggcaggagaatcacttgaacctggggtggggggcggaggttgcagtgagccaagatcatgccacttacactccagcctgggcaactgagcaaaactccgtctcaaaaaaaaaaaaaaaaaaaaaagaaagaaagaaagaaaagaaaaaagaaaatatacacatcctttatatgtaactggaaaagcacaggcaacccagaaaaaaaatgggtacatgacatgagccagcatttggagaagaggaaatacataagcatgtgaagacaggtacagatcaggggaacacaaatcaagaccatcgtaaggtacaattctatacccatgtgattagaaaataatgtaaaagtctatgtgagccaagtgctggagaagatgaggactgacaggatttctcacacattgcagccactttgaacaccgtgttggcagtagttctgaaaattgaaactcacgtgccctaagtccatcagttacctcctagggtagtacccaagagaaacgcttgcaggtgttgaccagggacattgacaagaatgctcacgatcatccacaaaagcagaaacctggcaacagcaggagagcaggcaaataaacagttcccgacccaccagcaggagagtgggtgaataaactacattatagccaagacagtgaaatattttacagcgatatgatattaaattaaaaaaaaacaccaagtctccaacactacctataatattataccctttaaataaaattttaggaatacatagagacggaaaataaaactatataaaaaaggaaacaggggagtaaggagcttggaattcaggtggtagtcaccttgagggggaggcaaggggatggggaagcacaggttagacacaggtgtggtcaaggcctcgctcctatacgggtgtgcattcatagcactggtgctaattacagtattaaaaagtaattcgttagacataaagtagggctatgtattgaccaatgaagagaatgtctcatgtcctaaggattatgggtaatttaattcagtccaccaggaatcctcaaaatatgaaaaaagaggtacagtagcaagtccatagttaccggctgtggcaccctactcccttcttggaacctgaaacgtccccattcgacttccttcacttatagctcaagtcgctgctggaattgactgctggaattgattgctctgctgtgaccctactctgtctgccctgggtacccggcccctcccacgacaccaccactgggagaggaggggagggggccacggatgaccattgtacctcagaggcttgagctggatggaattgtttctgtccagatctgtccctggcctgaccatgggtggctggaaaagactataaatggatgggattcagcttcctcacactcagcactccttgaggtcggcagcatcactggcagtggggctcaaagtttatattttccaagacagagaagttgagttgtggcccaccttgaaagccctaacagcatcacagaaggagagggtttggagaggacagtggctcaaagatttcgggggagaggagggctgcaggatggggaggaaaggagggaaattcaaaggggaggaagatgaaagtgaagtcgggagagatgaagctttgatctgcatattacttacagtatacaggcttccatctgtataatacttacaataatatagtaagtattataatacttacaataatataataagcattataatacttacaataatatagttgttattattgtaatatagttgttactatattattgtaagtattataatacttacaatgatataatatcattatagtagtattataatacttactatattattttattttatttatttatttttttgagatggagtctcactctattgcccaggctggagtgcagtggcgtgatctcggctcactgcaagctccacctctcgggttcacgccatcctcctgcctcagcctcctgagtagctgcgactacaggcgcccgccaccacacccggctagttttttttttgtacttttggtacagacggggtttcaccatgttagccaggatggtctcgatctcctgacctcgttatctcctgcctcggcctcccaaagtgctgggattacaggcgtgagccaccgtgcccggccaatacttattatattattaatatttataaataatatacatatttatattatttattttaatatttttcttttctttttttttttttttttttgaggcagggtctcacactattacctaggttggagtatggtgatatgatcttgacctcccaggctcaagtgatcctcccacctcagcttccctagtagctaggactacaagcacgcaccaccatgcccagatatattttggtatttttttaaatagacatggggtttcaccatgttgcccaagctggtcttgaacccctgaactcaagcaatccacccaccttggcctcccgaagtgttgggattaccagcgtgagccacgacacccagcatatttttgtattttatattacagttggccttctgtatccatggattcctcatctatgggttcaaccaacctcagactgaaaatatctttttaaaatggatagttgcatctttaccaaacatgtacagacattttttctcctgtcattattcccaaaacaatacatggtaacaactacttacctagcatttccattgcattagctattacaagtaatctagaagtgatttaaagaataggggagaatgtgcttaggttttatgcaaattctgtgccatttcatataagtgactcaagcgtccgtgaattttggtagcctgggagtgtgggggaggggtcctggaaccagtcccccacgggtaccaagggatgactgtatatttatatttactttttaatctgaaaaaggacagaattaagttttgctaacatctattatattattacttaggttcacatatatacttcgtacataagttaattcttcatgagctacttctactactaataatagcagcactttattgagcatttactatgtgtcagggaatattctaagagctttataggaattaactcatttcactgtaatgactctgtgatagaagatactatatgccccattttacagatgaggaaactaaggcacagaaaggttatgaaacttgcccaaagtcacacagctactgagtggcagacctgagtttgaactcagaggagtctggctcctgagcccctctgctgtgtgtttttctcctacacatacatatattgactccgtaggcgcaaaagcttttttgaaaaaaaatgtcagtggggatatatgattattttggtgtagacagtctcaaagatgctggactggcattcttcattagccccctgcttgggcagacatctgtttctgtgggacttggcactggtggagtctgccagctcctcccagctcctgacatgttctcttcctcctgcagcccacccggagagagctgccctgctgttcgtgtccagtgtctgcatcggcctggccctcacactgtgcgccctggtcatcagagagtcctgtgccaaggacttccgcgacttgcagctggggagggagcagctggtgccaggaagtgacaaggtcgaggaggacagcgaggatgaagaagaggaggaggacccctctgagtctgatttcccaggggaactgtcggggttctgtaggacttcatatcctatatacagttccatagaagctgcagagctcgcagaaaggattgagcgcagggagcaaatcattcaggaaatatggatgaacagtggtttggacacctcgctcccaagaaacatgggccagttctactgaaaaccacatgcatcttgatgcgatcgcactttctgaagaaggaaggatcccaaatgcccctccagttctggttcacctgtaccttctatgaaggagaattcgtcatgtcattcaacactcgtgaggccaggaagctattaaagggatgtttcaagctgtttctagcacattccaaaataaatgaggagggaagagtctttgttttctgtatttctttgaatttgtgtctatacattaataagttatacataattagaatttacatttgttgagcgcttataatgccaggcgctattctaactgcttttcatgttctgagtcattcaatcctcacaatgtcatgagctggtactattacccccattttacagatgactaaacagaagattcctatatatacacgtaaaacagttacacagatactcagcaaacatgagctcatgagtgattttaaccactgacttgtttagaccaacggttagcaaactttttcttaaaaggcaagatgataggctgggcacagtggctcatgcctgtaatcccagcactttgggaggccaaggcaggtggatcacttgaggtcaggagttcgagaccagcctagccaacacggtgaaaccccatctctaccaaaaaaataaaaaattagctgggtgtggtagtgcgcgcctgtaatcccagctacttgggaggctgaggcaggagaaatcacttgaacctaggaggcagaggttgcagtgagctgaggtcgtgccactgcactccagcctgggtgacagagtgagaaactgtcaaaaaaaaaaaagcaagatgataaatattttaggcattgtgggtcaaatcctctctgccacaattactcgactctccattgcagctcaaaagcagccacagatattacataatgcatgaacttggctgtattccaataaaacgttctttttggacactgaattttaatttcattttattttcacatgttccacgttcttctttttttttttttttttaaaccagccatttaaaaatgtaaaagcctgaggccaagagttcgagactagcctgggcaacatagtaagaccctacctctatttaattaaaaaaaatttaaataaaagtaaataaataaaaatgtaaaaaaacattcttaactcaaaggctgtacaaaaacagacagcaggatggagctggcctgtaacctgtttttgtaaataaagtatggtttgcaaaacctaaaatatttactttcttgccctctatagaaaaaagtttgctgactcctggtttagagtttaaaacagcagagcccctggtggtaatagccatcaaccagggtacctaacagtgctgtgggccaggatcaagtggagctggctcccaaatctctccaaaaacagggtcctaccccacttggggagggctgggtggaggagcagaagaaagagttcagaaaacagaccccagtgggagaacttattattggttcctgcagacggctctccctggtagacaggaggcttatagctgtggcatcaaataagaaaacatgttttttttcttttttgtcctagtaatcccaggggcttagaatataaacatgattgcatttttcatatgcctattaccaaagagctctctctctgttatcttattatcttacttcgtcatcactaaccctataaacatatgtagatgaggaagctgaaggccgccagggtaagtatcgtccagcccacgtcacacagctgggaagtgctgggactgactcgtcctgagtgctcaggaaacatagctgttcccacaggaactcctacagtgacaggtatggagaaggcatgtctctctcagtcttgcagaccataagggtgaagggcctatctgcaggatgcagaggagggtgggtgtggagtgaggaggctcagctgccactctggcattcatttttagtaagttgaaatccacataatgtaaaattaactctctcaatgacgtttagtccatttgcaatgttgtgcaaacaccacctctatctagttccaaaacatttcatcaccccaaaagaaaactctctgcccgttaagcagtcactccccattcctccctccctccagcccctggaaaacaccaatttgctttctgtcactatggattagcctgttctggatagttcatgtagatgggatcacacaacatgtagtctcttgtgactgcctcatttcacttaacataacgtcctcaagatccatctatgttgtagcaagtgtagcatgtgttcattccttttcagggctgaataatattccattgtacggctagcccacagtttgtttatccagccatcagctggtggacatttggctggttcctttggccactgtgaatagtgctgctgtgaacgttcatgtgtggcatttcaccagcacaaagcagcaactacagacagagctggtgggaaatcctgtgtgtccactcagtggaaggaaggggaaagtcaagatgggtcagaatggcaccccctcttctaccctccacacctgccaatttcaaagcaagcttcccttacacaggccccctgcaggtgggagagcagggattggccaagagaggtgtcatacagatgggctgggggtggtttgggtggagattgaaattcctcaggatttccaggtaccggaatttctcccatagggagaaattgaaggggttgaggatgatgtgttttaaccctttccccgtttaggaaaaaaaaaaaaacgcgactcactgtcagcgctcatttaattttacataaacacactttgaggccgaagcaaatctgactgattttcagtgtgaacataaaatataaaaagcgttcttggggccgggcgcagtggctcacgcctgtaatcccagcactttgggaggccgaggtcggtggatcacgaggtcaggagatcgagaccaccctggctaacatggtgaaaccctgtctctactaaaaatacaaaaaaattagccgggtgtggtggcgggtgcctgtagtcccagctattcgggaggctgaggtaggagaatggcatgaacccagcaggtggagcttgcagtgagctgagatcgcgccactgcactccagcctgggagacagagtgagactccgtctcaaaaaaaaaaaaaaaaaaaaaaaagaaaagaaaaagtgttcttggagttatttctaaacagaactaacaacagaatcatctatttcagaaaaactaaattcatcaaatgaatcttcagccaacaactgttggagaatgacgttaacctcaggcatgggaatgctacattttctaggatttgacattttcagcaatcgaggattactacactttataaatggagatacctctactaaaaacagaatgctataaacagaatgatgtcttttgtttccaaagtcaatgtacaagagcaatgcaaaaataataataaaagagagatttcctggaaaagttatctcggagtaaacgctacagcctcaagtgccactcgtgagtattctcagggcaaatgggagaagggttaaatctgtcattggagagaaatctatctatgtatttatttatttatttgagagagtcttgctctgttgcccaggctggagtgcagtggcattatttcagctcactgcaacctccatctcccgggttcaagtgattctccctgtctcaacctcctgagtagctgggattacaagtgttcaccatcacaccttgctaatttttgtatttttagtagagacagggtttcaacatgttagccaggctggtcttgaactcctgacctctagtgatcctcccgcctcagcctcccaaagtgctgagattacaggcatgagccactgtgcctggcctggagagaaatctattccagatcatatcagagaatgcagtgaattccattgtccaactatttcataacgattttgttctaatcaaagagaatctttgtcctttcatgtccctgagttcagcaaggagcattttgataatgtcccagctcccagagcagctgtctgtctctatttccagtttgaaggcagcatcttccctgtccccatgaacacaaatgctgtccagctggtggctgatgaccgtctgcttggggctgcagatgttcacgttaccagttgaagaaagagctgtgcccatattggcctcagtcacatggttttcttggattccacaatgggttttcgcttatctgaatttccccccattagcccccagcatgcatgcttacacacacaaacacacacacacacacacacacacacacacacacacacacacacacaccctcccaggatccctacagaggcagctggtcaacaggcttgccaactcgagggtcagtctttggcctgtgcagatacagtgagatatttctttgcattttcagagccccaaagaagaatgccatgttcttgttgtggaaggaggctgaagggtcctgctgagattgtgtttggcttggcacaaagtccagcgggaaaatgaccagagcagatttggatgagagactgctgatggactgtggtggctgggaggaagctgctgggaggaagctcccgggtggaagtcctcccagggaccacgggctcatatgggctgccacttcttgcttttgtgctttctgggcagcagagcccccacagtttccaagctgtggggtctcaggagccctgtgaaaagaagccagttccctctgggaggttcgcacgtccctagctcagctacttgctgctaatgctgactttccatccatgagctgcctgctgtgaaattctactcttctggatacaccgggcttgtctgaggggctgctggggcttgtagcagccattacatttgctgctgcttcagggagaagcccagggaccaagcaaacccagggaccatgcaggctctggggagcctagaggcagtcccactgctgaccccacaaatgggaccatgtgtgatgttggtgccccgttcccaggcacccagcctccagctgctgagaggagtggttgtgaatggcccacacctgtcctcttctacagagaattactcctccccgctttcctacaggtgtttcctcggagagcactccctcaataaatctctcgtgcacaaatctccatctcaggaaactgacttacagcatccaatgtgagaggtctgtggaccagggagtgtgccagcccctgctgagccacagtgctgggcggcatcacctgcaatgtcagtgggtgggagccaggcccaaaggaacatcagcaaccctccccactagcttgtggtgttgggaaaagtcaggcactcatacatctggcatctggggagtcttggaaagaagtgcccacaagatcccccttccagtctccccccagccttctccatgagtccctggaaaccagttactgctccaggaaccaaagcccagtgccaggcagtcaagggaaccaagccagcctctcctccaactccctgggtctcggcgctgctccccaaatccccacatgtccagtgggacctcctgagaagcaccactgccctgaaagcttccaccccacttcctgcctgccaccctggacccctggaccactgacgtcaaccagactagacacgactctgcttcagccctggactcggggtttcctcgttcactgtgtcactcttgtctcccagcttctgctctgacttggtcctagctcagtcttggggtgacttatctgtgcctcagtttcctcatctgtaaaatgggcataataatgaaatctacttcctagtggtgttgagagtcacggtgctttacacatagtgacaacaatacatttcagctttgatcatcgatgatttctttcccgtgagaggcagcatccagcatcccgtgtggccgaggttgcaccatttagaccacactaagggcatttcgcaaaactcaaaagcattataagaatgagtcattgagggagataacaagccagcctccttcagccctgctatagagacgagtttgtggaggagaaataattgcatctgcagagctcagaggaaaagtgtcaaggcctgaacttccttggattctgcagccaagttcattgtcaagtctctggcacatggacttaagctgtgctcagttttggcagggtagttgtaacccggaactatggtcatttggttttaaaaacctgttgtaagcctgagcaccagtgtggagttggctgaaccccactccaagactggatggtagccttggagattaaatcctaaatactccaacaaatgctctgtgaactggaagcctcactggtccatagctaaagagaaggcaggaaagagccacgataaccatcagcccatgagggaggattcaggaagccaactaaggatccgggactactacgtcatttttaggaatttcaaatcaacagtcgcctcctctgggtgtggcacagcgccaggctccctggagaatgaatgagagtagctaattgcagttgctgtcagttctgggctgtgctgtccgggactgagccactagccacatgctgttatttaaatttaaatttaaatcaattaataaaatgtaaaagtcacctgctcagttgcactagtcacatttcaagcgctcaatagccacatggccagtggctactgtcttggacagtgcagacagttctgttggacagtgctgagctagtgtatgaagtcaggcatggagacgcctgctcaattcattgataaaatgggacagatatttccctgccctcaccaactgagaacataatcagatatcaaaatcccaggcacagaaatgtgggaacccagctccaccttacccgacctctgcccaccttcctggggatacccctgcatgtctcttgtctccaaaccccgaaggctcagtgcacaggctcctgtccccctggggctgcagcctcaccttcatgggctctgagccccaaagagccacgaccgcaggagttgtgccccttccgtcccctggccacactcagcctgctgctcctttttgttcctaacacacaacccggccatggtcctgtggcagctgctgtgactgtcacctctctgggcactgctgctgctgttaactccccttcctttgtgccctgaaaagggtgtgaccaccttggagagcctaaagggctcctttttcctgaccctgcagccatctgcaccccaggaacattcgagagaaacctcaggccagatcttttcctctcacctgggccctgcctgccccccgctccaggaggagcccctgggtccacccaggaaggaactgcacctcctgccctcctctttctctctccctttgatcccttcttctctttgctgagcccatgagcagattcagcaggggccctttctttatccttcaggggcttagctacattagacaaagtgtaagaatgacggtaggccagccaccgtagctcacacctgtaatcccagcactttgggaggccgaagcaggtggatcacttgaggtcaggagttcgagactagcctggccaacatggtgaaaccctgtctctactaaaaatataaaagcctggcatggtgccaggtgcctgtaatcccagctactcgggaggctgaggcttgagagtctgttgaacccgggaggctgaggtttcagtaagcagagattgtgccactgtactccagcctgggccacagagtgagactctgactctaaaaaaacaatcgacatcaagggttgggtgcggtggctcacgcctgtaatcccagcactttgggaggccaagacaggtggatcacctgaggtcaggagttcaagactagcctggccaacagggtgaaaccctgtctctactaaaaataaaaaaaacaattagccgagcatggtggcatatgcctgtaatcccagctactcaggaggctgaggcaggagaattgcttgaacccgggaggcagaggttgcagtgagtcgagattgcgccattgctctccagcctggacgacaagagcaaaactctgtctcaaaaaagtaaaaaataaattaattaattaaatacaattgacatcgaagaatgacagtaaatggccaaaccaagtggccctgggagctcagagaaaatgattccaccaaatggactaggggaagcttatcagagatcacgctcaacatggtcctctaagaataggcagaatttccaaaggtgaaggaaggtagggaagggagcagccaggaggtgggaacaggaacagcacgtttaagtacagggaacagccagagtgagggaaaataaggctaaaagggtgaagggcacctggagaatgttgatattttgggctttggcgcgtgcctgtgtcctggctgtaagaacattacgcactttgggcggcatcactcagcctgctcctggttgtgggtccattatctgctcctaatattgtctttcgtctcgggattgtgaacagataaggaacccacagccaggagcaggctgggcctggcctccaaccttgaccttctgactcttggaatagtaattgctccggattttaaggtcactgaacaccatccagttaatctcgatatcttggaagtgaccaaattacagctgaatttcgttgaagaaattaaaatcatcactcttatcctaagagtgattatcctaagtattccggtgactgactcacctgggacactttaagatgcagttaatatcatcaatgcaaatagacctcaagggtctaacaaattatttctggcagagcccttttttgaaatgtttctagtctttgccccaagactgctcactgcctaattgcatttctttccaatgggtctaacagaaaatcccattggaaatttatcttcaggtgaaaatgccgccttcctgcttttaagcgaactgcctgtgatatcatgagctcaggctgcagaggctcagccaaacaaagagaggaaagctggttacttctgattgggaggacgtattaattccccacactttccctgttccaaactcatgactccatggattgagtccttttaagaaaagaaaatagagcctgtcatttcctattgtttcaaagacaaaatccagcctgggaaagattaagggaagaggacgggactcgtgttcagatgactaagcaccaacctgacctggaaaaggctcgattagtttttgaggaagggagggtgctccaattagaggcatgtgtaaaataatgacattacctcactaaaagagaaaaaggaaaacattcccaactcactaacaatgaactagcaagaaaatgtgttgctaatctgtgaagaatttgcaaacccagtgagttgccacccagctctgagctcccaaacttccttccttagaacttgacctctgattgtaaaaccctgggccctgggagagaggggcctgtgctggtcagcaagggggaatcacatggaccagccaagcccagctctgctccgcccggggtttctggtaaatgagcctctgtcactcagttcgtacacatggatacttcttattgaagatgtcttgggaaaaagtcaagctgctctgaaaaaataataaaaatgcactgtatcatgtttttaaaagagctagatctctatgtaccgacatggaaaatccttaaagtcattattaaataatacatagattatgataacgtgtttttaaaaagactcaaaactgggccgggtgccgtggctcatgcctgtaatcccaacactttgggaggccgaggtggatggatcacaaggtcaggagttcaagaccagcctggccaatatagtgaaaccccatctctactaaaaatgcaaaaattagctgggcatggtggcacacgcctgtggtcccagctactcaggaggctgaggcaggagaattgcttgaacccaggaggcagaggtttcagtgagacaagatcgtgccactgtaccccagcctaggcaacagagtgacactctgtcttaaaagaaaaaaaagaaactaaaatgttggtggtttggacaaatcctgcccctgcaccccacctgcatgtcccctccatgacttcctgttgtgtaccagggtccctgaggtgggctgaaagagggccgggagctggctgttcagagtcccccagaagcaaaagcagtgggcctctggccctgtgggcagggctggctgaagcagagccaggagggagggctgaggaaggctgtcgtgcacctgcctggccagccgtgggcagtagaaaagaggctgggatggggccaggtgagcccagctcaggtcgggggcctggcaggccctggacatgtctgctcacagctgctcagaagtggctcctcgggttggcccttgctgccctctgagctcttgtctctgcattctccatccacccccaccccagcttcttgccggccctgtgcacagacacctaaggcccgcctcttagggtcagcttgccctcaaaaagagaagaaagcataggtttccaggactggctgatgaagggagggtttgggatttctggagacttgaagttgagcttgaattcctcccctctgactttcccaggccaaggcgtccagcacccagggaccaagccctggtcctcagcagagaccgtctgcagcccctgccctggtctcgctaacactggtttaatatatctacaacgagagattcccaaaccccacccaagagtccctgagggcagaccttggggctccaggcccaggaatctgcattctccgccccccaaactccccccaggggtcctgataggcagacagctgagagctgggcttgcctccacctgggtccctgaaacccagcaccccgccctgttgcttgtctcttgcagcccaactcctgcagctgggccttctgctcatcctgtacagaaaccctctgtttgctcctgcagacctgctctccatggcccccagcctgctccactgtcctgtacctccagacccccatcagcatctccccgcctgtctgctgggttcagccaatggggagcctggcaggagaaagtcatgccatcagctttgaagatactttcctttcctgacttcttatcctggggttcctgaactctgttttttgttttgttttagatggagtctcactctgtcgccaggctggagtgccgtggcacaatctcggctcactgcaaccttcgcctcccggattcaagcggttctcctgcctcagcctcccgagtagctgggactacaggcatgcaccaccacgcccagctatgttttgtatttttagtagagacggggtttcaccatgttggccaggaagatctccatctcttgacctcgtgatccacctgcctcggcctcccaaagtgttgggatcataggcgcgagccaccatgcctggccgaggttcctgaactcttaaggggaccactgatcttttctagagctccatgagccctctgaagttttaagcaaaagtttgtatatttgagaatgtgaatctttctggctttttcatgggattgcaacgaggatccaaagagataatacaaatgatgtcagctttgacaaccactaactgcccaaaaatataaggtattatcataatcacagcaagatcaaaagaggttaatgcgcgtctctctgtgtcaagtgttcatgaaacttctgttgaagttggccaccagattgggccagcatgcacatgggcagcagacaacagctttacaggttgttagaatgagaggctgaaccctagcctctggaaggtgacaccgcagaggccatccacagaagtgtgggtcttcctagaaaatgatgcaggcaggtccgggtgtagtgcctcgcgcctgtaatcccagcattttgggaggcggaggcgggcagatcacttgaggtcaggagttcaagacctgcctggccagctggtgaaaccccatctctactaaaaatacaaaaattagctgggcatggtggtgcaggcctgtaatcccagctactcaggcaactgaggcaggagaattgcttgagcccagaaggtggaggctgcagtgagccaagatggagctactacactccagcctgggtgacagagggagactccatctcaaagtaaaaaaaaaaaagaaaagaaaagaaagaaaatgatgcaggcaggattaataaccagaatatataaggcgatcaaacaactctataggaaaaaaatctaatagtccaatcaaaaaatgggcaaaagatttgaataggcatttctcaaaagaagacacacaaagagcaaacaggcctatgaaaaggtgctcaacatctgtgatcatcagagtaatgcaaatcaaaaccacagtaagatagaatctcacctcagttaaaatggcttttattcaaaagacaggcaataacaaatgctggagaggatatggagaaaagggaacccttgtactctgttggcaggaatgtaaattagtacaactgctgtggagaacagtttggaagttcctcaaaaaactaaaagttaagctaccatatgatccagttatctcattgctgggtatatacccaaaagaaaggaaatcagtaaatcaaagagataggtgtactcctctgtttgttgcagcactgttcacaatagctaagatttggaagcaacctaagtgtccatcaacagttgaatggataaagaaaacgtgatacatacacacaatggagtactattcagccgtaaaaaaaagaatgagatccagtcatttgcaacaacatggatggaactggagatcattatgttccatgaaataagccaggcacagaaagacaaacagagcatactctcatttatttgtgggatctaaaaatcataacaagtgaattcatgaacataaagagtagaatgatggttcagaggctgggaagggtagtgcaggggagtggggaagggggtgatggttaatgggtacaaaaaaaataggaagaatgagtaagatctactatttgatagcatgacagggttaccgtagtcagtaataacttaactgtgtattttaaaataatttaaagagtgtgattggattgtttataacccaaaggagaaatgcttgaggagatggaaattctccatgatgtgcgtatttcatattgtaggcctgtattaaaatatctcgagtaccccataaatatatacacctcccacgtatccacgaaaattaaaaattaggctgggcgtggtggctcacatctgtaatcccagtgctttgggaggccaaggcgggcggatcacttgaggtcaggagttcgagaccagcctggccaatatggcgacactccgtctctactaaaaaatacaaaaattagccaggcatggtggcacaagcctgtaatcccagctactttggggactgaggtgggaggatcccttgagcccaggaggcagaggttgcagtgagctgaaattgcaccactgtactccagcctgggtgacacagcaagaccctgtcaaaaaaaaaagaaaaaaagtgggagctaagctctgaggatgcataagcatgggtgatataatggactttggggacttgcggggaaaggctgggaggcgggtaagggataaaaggctacatattgagtagagtgtacactgcttgggtgacaggttcactaaaatctcagaaatcaacactgaagaacttatccttgtaacaaaaaaccacctgtaccccaaaaactgttgaaataaaaaaagaagaaagagaaaaacaaataaataaaagctgaacccaggaggcggaggttgcagtgagccgagactgcaccactgcactccagcctaggtgacggagactctgtctcaaaaaaaaaaaacttaaaaaatttaaaaaagaaaatgatgcaggcactgcaaatagaacatacttgggtgcatgtcggggaaagcggagggggagacaccagggtccatgaccccatggcatgaggacatgattgtggagccgctctcttgctgtccacaaagtcactgtaaaagcaaagtgccaaacattttcagtgagggcctttttgctcattggtcatgactggtgtcaggcaacccttggaaatttcctcacgaccttagagggacagcatcacctgcagtttctatggcagagattccatagtaggttgaacactgctcccccaaatacacgtcttcctggaacctcagaatgtgaccttatttggagacagggtcttcacagttataattagttaagatgaggtggcactgatgggctctaactccaatgactggcggctttctaagaagggggaagacagacagacacacagagaagaatgccacgtgactagagaggcagagactggagtgacgcagccacaaaccaaaagtgcaaaggattgccaggggccaccaggtgccggaagaggcaaggcaggacccccttcttggtcttcagagggagcacagccctgccaacacctttatttgagacccctggcccccagaactgggagagaataaatttctgttgttttaagccacaccatttgtggtcattagttatggcagccacagaaactagcacagaagcttccagagctgctcccaagagtggaagtggcacaaggcgaggcatggactagtcacagatccccagccagaagcaggggacacattcacactgggatgactcaaggaactgtatgtacaaagcacgagctgagccctgctctgtgccagacaccatgctgggtggaggccaggagttgctggaaaagctgtaacaaccagcaaccccaggtgtgggcagagaagtgctgatttgtagcatctgccaatttctgtggtgtaaatactccctccttggccaacgcgagtgtaacacaacgtccttcatatagtgtttctaccctacaggtacaatcaatgtcaatgacctcaagacaatagtaaaataaggtgaaataattaggaaatgttgagttttgagaattgacagcctttgtgcctaatataatctatttaattgtaagcttctgtaatttagtatttcatggtgactgtgtttaacaaccaatttgcaaaaattcctgaatgtttaaccatcagctgccatgagccagagctggctacaagaagtagagcagtaaagatggcagacggctaacataacctcaactaggtggggcctggaatgcagcaatctggctccaataggatgcttttgggtagatgtgcctggagcacctccacctctgaggcccgcaaagctgccccagaggaagggtggcctgcagagcagcctctgcatcagctctcagctggtccagggcacagcatcagttgaagaacactgactatgcccagtcacatcagcttccaactgtgagctctcaggagacctgttgatgcagagattcctggaggtggtaccaaaaaagccaggagcaggtgggcactggtgcacatacaatacacatatagacacacacacaccatgcacagaacatacagacacatgcatgcacagaacatgtagataggtacacacacatgcacagagcacgcagacacacacacatgcacagaacatgcagatacacacacatgcacaaacacactcctgttacggtttggctgtgtccccacccaaatctcatcttgaattcccatgtgatgggggagggacccggtgggaggcaattaaatcatgggggctggtctttcctgtgctgttctcgtgatagtgaataagtctcatgagatctgatcactttttaaggggaagtttctcggcacaagctctctctttgcctgccgccatccatgtaagatgtgacttgctcctccttgcctcccgccatgattgtgaggcctccccagccatgtggaactgtaagtctaataaacttctttcttttgtaaattgcccagtcttggctatgtctttatcagcagtgtgaaaacggactaatacaactcctttttgcatttttgccacaacagtttccttcagtacaacagctactttttaaggagtgctttctgtcagggaccaggccaggcactaggaatattcacatgaagaaggcaaagcccaggaccttccatcagttggtgaggcctgtgattggccacagctgcctgcgtctcattctgccgctgatctaaggaagcccttcattgccacatatctcagccttaatctccattgtcagctctctccatcctgaaggtgagaggtggttgctagttactttagagctaggatgggaaacagggtttgatttctacagccctcacaaatacctgcatttggcattgcgcacaattcgtgatgtagatgcaacatgaagtgaggtgaaaattggtaggctgggcatgtcagctcatgcctgtaatgccagcactttgggaggctgagctcaggagtttgagaccagcctgggcaacatggtgaaaccctatctctacccaaagtacaaaaaattagctgagcactaccgcgcacttgtagtcccaactactcggaaggctgaggtgggaggattgcttcagccagggaggtgaagtttgcagtgatccaaggttgaaacactgcattccagcctgggtgacagagtgagacagggagggagggagggagggagggagggagggagggagggaggaaggaaggaaggaaggaaggaaggaaggaaggaaggaaggaaggaaagaaggaaggaaagaaggaaggaaggaattggtcacctggactgggttatgtgagttcctgtgagtacttcttatagctatagtaatttcaaccaggaacaccaatcattctggtttgtgagggatgaatgggttagtgctacaatgagggtagtagtcttaggcaatacgggatgggcaaccatcctaattctcacctcccttctgacagctcaagtttgaatactgaggtctgcaaggacattatactgagacctgcaaggacatttgtctcacattgcaataaacagccaccgggttctaaatctgattttgcttaaatccatttctctaagaaatattatagcatttactccttttcattgtataagacatgttgaaaaacagccattcatttctaaatccttcttttcagtcacttttaatattcttttaaaaagagagaaaggaaaagaaaagacttcttgggactaaaacttatcatagttggatgaaacccaaaggtgaatatttatttcagcaaaattcattcggggccttgaaagtcaagtgtgtgaatataaaatacaccttttcagcctgggatcatgcccttttctgtgcttggatggctgaactatgaaatgccaggttgacatattcagtgcttccaggaatgtgaccccagaagaaacaaaggggaatgtggcatttgtggaggtggccaggccggtcagccaacttggctgggttctggaagggtctagtccatgggctcccaccatatcccaggtgattctatctgctcagagttcacaggaaccacagattcccacaccttcattcccgaggggtgggtgagggggtgtctacatgctccttctcaagcacagctgtcatttgttccagctttgtctccccatcctgaatccagcacgaggaggtgtctggatctcacacaggatgcattcacaggggctggggtggaaggatcaatcagcaccttcaaattccagccctcactgctgccaagacagggcaccacgttctcgcgctcacaaagacgatcctgcaccagagctgcatgaacagggctttcaccttttcatttgctcactcattccttccatcagaatcaatggctgcttgcaggacaaacaaaatgcacgtgcctgcatgtgtgtgtctgtgtgtgcttgtgcatgtctgtgtgcatgcctatgtgtgtctctctgtgctcgtccatgtgtgtgtgcatgcatgtgtgcctgtgtgtgcatgctatgtgtctgtgtgtgcatgtgtgtgtgcatgctgagtctgtgtgtgcatgtgtgtgtgcatgatatgtgtctctgtgtgtgcatgtgtgtgcctgcatacatgtgtctgtgtgtgctcatgcatgtgtgtgcatgactgtgtgtctctgtgtgtgcttgtgcgtgcatgtgtgcacgcctatgtgtgtctgtgtgtgcttgtgcatgcatgcctatgtgtgtgtgtgcttgtgcatctgtgtgtacatgcctatgtatgtctgtgtgtgcttgtgcatgactgtgtgcgtgcctgtgtgtgtgctgtgcatgtgtgtgtgcatgtctatgtgtctgtgcgtgtgtgtgcatgcctatgtgtgtctgctcatgcatgcatgtgtgcatgcctgtgtgtctgtgtgctcgtgcatgcgtgtgtacatgtctgtgtgtctgcatgctcacatgtgtgtgtgcgtgtgtatgtgtgtgtacacatacatgcatgtgtgcgtgcgtatgctatttctctctcaagaccacattgcaaactggcccctgtgggatgttgtttctgccttacagattgacatgtgtatgtttgaacagaggccggccagcatggggtcacactggcttcagttaacctgggttccaatcctgcctctgccacttggtagcggtgacaccttggtgactttctgggcaccatttctgcctccatttgctcatctgtaaaatggagaccacacaaggctgctgtgagaagtaaacaaggtaaggaatgcgaagtgccccacaggacccaagcgtggtagcccccagtaaatggtagctgctgttcccctaggatgtgcccgttgttctagccccgccaggcatgctccctgcccctctctctgcttgctgggaaaggctgggtttggttgataaagtggaaagttttcctttctctgatctctctctcatcaccagtaggtagttcatccacacagaatacacagaaagttttcccagctttcatgaaaaggaaacccgggaggaggtgggcaatggagggcggcatctctgtgcttacctggctaggccctggactcagagcccccgctatgacccgggttgtttctctggaaaaggcccaggtcacctcagtcctgaaaattattcactcctagtcagcgccagtgtctgcccatcaccctcaaaagcctcggaaagtcccacacagcggctccccaaatcagtcctctggacccctgccagggagctcacaggacgtactatcttcttaaaatcctgttttctaaggcttatctaggaaaacagtgaaagttatatatatatatatatatatatatatatatatatatatatatatatatataaaaccatctgatagcatgtgctaaactgtgtgattcctacatctaaaaatatcagcattaacacaccagcattactcaaatagccaaaaggtggaagcgacccaagtgtccatccacggatagacagagaaacaaaatgtggtgtatccatacaatggagtattacccatctttaaaaaggaaggaaggccaggtgcagcggcccacatctatgaacccagcactttgggaggccaaggtgggcggatcacttgaggtcaagagttcgagaccagcctgaccaacatggtgaaaccccatctctgctaaaaatacaaaaattagccaggcatgatggtatgtgcctatagtcctagctacttgggaggctgagggagaactgtttgaaccagggagacagaggttgcagtgagctgagattgcacacctgcactccaacctgggcaacagagtgagactccatctcaaaaacaaataaataaataaaaaggaaggaaattctgacacatactccaacacagatgaaacttaggccattatgctaaatgaaatgagccagtcacaagaggacaaattgtgtgtgtgtgtgtgtgtttgtttgtgtgtgccacttataagaggtatctggaggagtcaaatccatagaggcagaaagtggaacagagcttgccggggactgtgggggtagatgggaggaaatgaggagttaatgtttaatggaaacagagtcttagttttgcaagttgcaaaagttctgggatggtttgtacaacaatgtaaatgtacttaacactactgaactgtacaccgaaaaatggttcagatgccgggcgcaatggctcacacctgtaatcccagcactttgggaggccggggcaggaggattgtttaagcccaagagttcgagaccagccttggcaacatagtgggacctcatctctacaaaaaatcaaaaaatgagtggggcacggtggcatacacctgtagtcccagctactcaggaaactgaggtgggggaacggcttgaccctgggaggttgaggttgcagtgaggtgtgattgtgccactccactgcagcctaggtgacagagcgttaccctgtctcaaaaaaaaaaaaaagtttaagatgataaattttatgtgtattttactacaatttaaatatatatgtgtatacatatataaacattcatattcatacttgcagaattaatcactaacactatgaaacccagcccttgcgtggctctgccaatggctggcccagccaccagccccatgtcaattgcctgagtccgtcccactaggatggagcctgcagtcctttccaccctgcagtgaggccattctgggaaaacccggtatacacaagagtatccacggaaaacagaccaaattaaatgagatgcatggtgttggtcgtgcagggacacaggcacatggagcgggtggggtaggcaggaactgaacaataaaaggacccagacaagatcctaaaagaattggagagatgaaaaagtgtcctaactcattaaatcccattcgtttattcattcaataaatactttttttcatttgccatctgtacaacttctttgatagggtcagatattttgctcatttttaaattgggttatttgttttcttattgttggttttttttgcttgtttgtttggttgggtttttttgagacggagtcttgttctgttgcccaggctggagtgcagtggcttgatctcggctcactgcaacctccccctcccgggtttaagtgattcccctgcctcagcctcccaagtagctgggactacaggcatgcaccaccatgcccagctaattttttgcattttagtggacacagggtttcaccatgttggccaggatggtcttgatctcctgacctcatgatctgcccgcctgggcctcctaaagtgctgggattacaggcgtgagccaccacgcctggcctatagttgggttttaagggttctttatattttttttaaataccagtcctttatccaatatgaatttttaaaaaaattgagtgggggccgagagcagtggctcatgcctgtaatcccaacactttgggaggctgaggcaggaggactgtttgaggccaggagttcaagaccagcttgggcaatatagtgagaccccatctctgcaaaaaaaagtttttaaaattcgcatggcacgatggcatgcacctgtagtcccaggtacttgagaggctgaggcaggaggattgtttgagcccaggaggttaaagttacagtgagctgtaattgtgccactgcacttcagcctgggccactgagcaagacagtgtctcaaaagatagaaagaaagaaaaagaaaggaaagaaagaaagagaaagagagaaaagaaagagaagaaagaaagaagaaagagaaagaaacaaaaaagaaagaaaagagaaagaaagaaagaaagaaaaggaaagaaagagaaagaaagagaaggaggaagaaaaggaagggagggagtgaggaaggaaggaaggatgggtgtgtccataccaagtgccatcctatgaagtgaactaaacagaaaaagtcctgcccacattgtgcacttttctggggggtgggtggtattttatcaaaatggccagtgaaggtctctttaataagacagcatttgagcagaaaccaggaggaatcaaaggagcaagccttaagaagggtggaaagagagctccaggaaaagggatggtgtgtgccaaggtcctggggacacccagcctatttgcagaagatcatgagagaagatgggttgggggtagggggtgggtccctgtgaaggacttagactttgggctctgtatttgtttcctgtgactgctgtaacaaattgccacaaactggccgggcgcggtggctcatgcttgtaatcgcagcattttgagaggccaaggtgggcggatcacctgaggtcatcctggccaacatggtgaaaccccatctctactaaaaatacaaaaattagcaggtgtggtggtgcatacctgtaatcccagctactcgcgaggctgcattgagtgttgctgagaactcatgcaggtgacggaccactggatccaacagcatgaaggccagcagtgaccttggccagagccacttttgtgaggtggtgtgcatgtgagtaatgtggaccagagccagctggagtaggatcaggagaagaagggaggaaacagcaggtgtgggccactgtcctaaagttatctatgaaagttattcttctataaagaggcacagataagtgaagcaatagtgagaggaggggtatcaagagagaatgttttagtatgccattttgtttatttatttacttgttacataaatgaagttatatttatatattttagtaagttactttctttgggcaaaatacattgtaattatcctatttgctatagttctgcaattaacttcaaaatttttaaagttagccagtcagtgaatctgcttacctgattgtgtttgtgcagatatattttaaaaactggcaatagtaggctgggcatgttggctcacacctgtaatcccagcactttgggaggctgaggcgggtggatcacctgaggtcaggagtttgaaaccagcctgaccaatatggtgaaaccccgtctctactaaaaaataccaaaattagttgagcatggtggcgggctcctgtaatcctagctacttgggaggctggggcaggagaatcgcttgaacctgggagatggaggctgcagtgagcagagatggcgccactgcactccagcctgagcgacaacgagactccctctaaaaaaaaagccacattatgagccttaaggacgttgaagatgttaaggtccctgaaaacggctaaaacaaattttaatgatggcaaacatttatttatttatttatttatttttttgagatggagtctcgctctgttgagtgacaacacatggtctcacttatatgcggaagctaaagaagagctcacagacttggtgaatagaacagtggttacaggaaacagcaggggagtgaggtgctggcggtggggagcttggttaacatgaacaaagctacaattagaaaggaagaagttttggtcttctcatggggtgagtaatttactgtatattttcaagcagctagaagagaggattttgaatgctttcaacacaaacaaatgataactgtttgaggtcatggatatgctaattagactgatttgattattacacacggtacccatgcaccaatacatcacactttaccccataaatatctacaattattacatgtcaatttaaaaaatccatggaaacaaaaagtagaatgacttttgctagagtcttggggaagagagaaatgatgagctagtgtttaatgggtccagagattctggtcaggatgaaaaagttctggaattggatggtggtgatgatggttgcacaaaattgtgaatttacctaatgccacagggctgtactcttaaaatgttaaaatggtaagttttatgttacatatgtctcatcacaattaaaaataaaagagtacatgcattcattttgagaaaaaacaagtctccttcactttgaaggtgtcagctcccagaacataaggacaaagagaaaacctcagagtcatgtttaacatgtctgatttatactgaggacaaattaaagaaagtaatttatataacgaagagtaaacttatggaactcattgccgaaagaggaggcacagacataaaaatatccaaagacatctacgaggaattgttcacacatttattgcatttattgacagcagcctaacagaacatggagcacgatcacgtttggagtcaccctgaggttcacatcacagcacacaagcagctttttgccctacaggcattgcgccccagtgagtttctgaggacaggaatggggagctggacggacctgcaggtcctccccatggaacaaacgctgcaccttgcacacacctgggtccctgctatgtccagccccaacctgtgcacagtgaggagagcacacctggtgatcaggatggggtccaccctgagatgttcatcgcctacctgtgcatgatgagggcagcacacctggttgtaaacacaaggtcacccctgagatgcccagtgcctacctctacatggtaaggacagcacaaagtcacctctgaaatgcccagtgcttgtacattgtgagggaatcacacctggttgtcagcacggcatcacctctgagatgtcctcccgttcacatgtgtagcaacagaaaaggtctggcttaacaactgtcattctcagctcccaaacaaagcagaatagggtgttgtactcatatttaaagctttgttttgtatcgtatctgtttttataaattgtctatttctttttccatgtaggctaaagttacatcttcaataagccaagtaataggaaattactttgctcatcgcagtgaccctggaatgtagcatagtatcagaaagtaggaaagtaccccccaagaatgtgtttttaagatgagggcacatcagaaagacccaagaatcaatctaataaagctcccagtggcctgagctaatataatttgagcaccataataaatttcaatcgtattgaattatcatctaaagaataaaataaatatccatcagcacatactgatataaataaataaataaataaacaaaagaaggaggaccaatctttcttacataagaaatccaattaataaatgtagagagaattggagaaacagggaatcgccactggaacaccacagatatcattgctacgggcaagactaattgataattgctaaaattagtgattgaaccttaaggagtaacaagatatttgcatcatatttgtatcccttcctaaatttactaaccactcttatggttttaaaacatgactttgggccgggcgcaatggctcacgcctgtaatcccagcactttgggaggccaaagcgggcggatcacgaggtcaggagatcgaaaccatcccagctaacactgtgaaaccccatctctactaaaaaaacacaaaaaaaaattagccgggcgtgttggcgggcgcctgtagtcccagctactcgggaagctgaggcagaggagaatggcatgaacccgggaggcagagcttgcagtgagctgagattgcgccactgcactccagtctgggtgacagagcaagactccgtccccaaaaaaaaaacaaacaaaaaaaaaaacatgactttcatactcaagtatagactggacttagtgacctgcttttatgaatagatgacagaaagaggaaaattgtaacttgacagtggggaaacctaacagacatcacattagccaggtgatcaaagttaatgttacctgcagtcatgctgacattatacgcccactaacatgatacaatgagaagggcctatcacctctgtggtgttcttctccaaaatccacagcctcagaatgtttatgagaaaccatcagataaacccaagttaagggcattctacaaaacacctgaccactactcttcaaaacatctaaagtcatgaaagacaagaaagtacagagaagctatcacagattggtggaaactagggggacatgatgagtgaaggtatcaggatatcccaaacagggtcctggaacagaaaaagcacattaacagaaaaagttaagaagtccaggccgggcgcggtggctcacgcctgtaatcccagcactttgggaggccgaggcgctcggatcacaaggtcaggaggtcaagaccatcctggcgaacacggtgaaaccctgtctctactaaaaatacaaaaaattagccgggcgtggtggtgggcacctgtagtctcagctactcgggaggctgaggcaggagaatggcgtgaacctgggaggtggggcttgcagtgagccgagatggcacccactgcactccagcctgggcgacagagcgagcctccatctcaaaaaaaaatttgagaagtccaaataaagttggtagttctcttgctaatattgcaccacatcaatgtcttagttttgataaacatactatgtaagacgttaacattcggggaagttgggtgaagggtgtatgggaacactctgtactgtcttagtaactctttatgaattctaaaattatttcaaactaaaaagttttgtagaataggtagagttgcaaataatttggtgagaggtgcagatggaggtatctcttatctgtgaggcaataagtcaagtaaattgctgagaaaaatgtgggtgggagaaaatggcacagagggcctttgtcatgacttgcctgaaggtcgatactgcattagaaaaaaattatccaaaaatgaccacactgtgctataatggtgccatgtctccatgtatctgccacatctgcattctctgggcttgctgtagtgatgggagggattcaaatcctcctcttcagcaaaagaagtttctggatggatggtctgagacaagaagggatgtcctttccccgggctgcgcacggattccaatgccccactaaatgatgctaacaggcatcatctctggccactgaagcccaggctcttaagtttaatcataaaacgctttggtctcatgggctgcaaaccaccaagatagaactaagattgataagaaaaatatactgtttactcaaaacaggtgtataccagcctacatatttataatgtcctattatacggttgtacagttcatatcctcaataattcagtaggtatctcgctaacatctatttgaaatcccccccagaataacatttagcaatagcttcctgatctctttagaatggtgtccttatttttcttaaacatttgatatgttacaccacccaggtggaaaatagaacacagagtgtaggatacacacttactcaccataaaaacaaccatactgtaacaccaaaatatatttatccaattggtcaaggaaattgaatttaacatatgctgttatcgtacaagcatttttaatgaaataacattttgtatgtatatagcacctttctactaaggagcaaaaatatggctcagacattattactcattttcacactatcctcgacaggtggataagtagcaacatttataccaagttttaatcactgggaaacaaagacatgcataaagagagcaaataaaccacaaatggtaacccagaaagttggcattttccaccccccaatgcccactgtggtcccctcactctttttttttctgcaatattaaaagctactttgaatattggtggaaaaaaaatagaggaacagtagagtgatgaaacaggtatataccagcctcctcaggaaactgatggtggagcttagactggaaactgttgaaagttaaaaataattcccaaaccttgaccatctacttggacaaatttgatgtgtaccagggacaaatgaaagtatccttccaaaatacgtcccaaattattgtcaagcctttctgtaataaaggtccattcctcaagctgctgtcacataatgtgcaggtgatcaacagcaaatccattagcaacacaggataaagaaatttgtgtagccccaatagcaaagacttggaaccaacccaaatgtccaacaatggtagactggattaagaaaatgtggcacatatacaccatggaatactatgcagccataaaaaatgatgagttcatgtcctttgtagggacatggatgaagctggaaaccatcattctcagcaaactatcacaaggacaaaaaaccaaacaccgcatgttctcactcataggtgggaactgaacaatgagaacacatggacacgggaaggggaacatcacacacctgggcctgttgtggggtggggggaggggggagggatagcattaggagatatacctaattttagatgacgagttaatgggtgcagcacaccaacatggcacatgtaacaaacctgcacgttgtgcacatgtaccctaaaacttaaagtataattaaaaaaaaaaaaagaaatttgtgtagcccagaaactcttgcataaaacataacttcaacaagacagtagtacattttggatgatgcattcctgaggagctctttaaaaattcattcaaggaaataaaaaaaaaagtctctttaatgataaatgcaaattacaggcatagttggagcctaaaattatgtcttgaataggaaaattaccagaggatgaattccttaagagcacgactgtctttcaagagtttctaatatatttaatctccagtaaactctaggatatccaaaggtgtagtaccctttttttttccagaatatgcagtgtctgagaaacttgtatcacatctatccatgcattcaactaatgtcagcaaaactagatgacaaatcatacataaagggaaggatgaaaatattttgttgtaaacttctgagacatagggataaggaaaggaagttacataatattctaataacaaatttcaataatgtgaaaaaagaaaaataacagccaacacttatgaagtacttctatgcactagtatgggtaacggcgccaggcacaatacatgcgttatctcatttcctcatcacaagcttcctttgagatatacccattttatagacttagattaagatgcttgtcagaggtcagggtacaagcagctgtctgactccaaaccctttatggaggctgcctggctttttctctagctcttcacttcttaattagtgcagagaatcaagtcttgcctttcatttcttcccctgcactgaagaaaaatctaaaagtcatccttttgtaacattgaaaacttggaataaaaaattcattaaaatattatctatagaaacactcccaaagcctcatagcaagaaattcagataaaagcacatattttcactactttaatgtgcatgagtttaaagtccatgactgttatttttatcttcatcattccctatttgactgatttttaacctatcatgttacaccatggagtggcaaatactatcaaggaatcaaaaaaagcaactccttcaataatctaatttataggaaatagagtaaattacaatgatgcctctttaatctaattaattagctaattgattaatttaattagttaattaactaatgtccctgatgggcaaagttttcttaaccagagagcttcctggcccacacaagaaaggaaaaattaatgatccatcagctgtttctgaacttcaggatagttggaggcccagcttcagggatcacgtcttctgtgaggtcacaaaggaaattacgccttcaagaatgcactgttcaagccatatccttgactccgatgaatcaatcaggaaagggctattgttataaataagcaaatgagactggtcatcaagcaactggtcctcaaggtttgacttcttttcttctccaccactgaacagatttacttttttttttttttttttgagatggagactctctgtcgcccaggctggggtgcagtggtgctacctcggctcactgcaaccgctgtctcctgggtttttaggcaattctcctgcctcagcctcccgagtagttgggattacaggcacccaccaccatgcctggctaatttttgtatttttagtagaaacagagtttcaccatgttggcctggctggtctcaaactcctgacctcaagtgatccacccgccttggcctcctggagtgctgggattacaggcatgagccaccatgcctggcctaaatttacttttaatctcatgagatgctgaggactaagaccccctccttcccagggcccaaagcaagaaaatgggatggagaggcccatctccaaagatcttacccttggaataagggtctttttcccacacctccttgacatctattccccctgggctgtttttattttcctaacccacactccatcagctttaagcactaaagaactttttggccacctcaggacaaaaatttgttacaaaaatcacctcctaaatcaaatgagctgagcctcactaagtaaatcaggctttggacaggctccgcttcctgttggttgttcatacatttgtgttgctcaagtcttcatcttagaacccaaccccgccttgctggattcctgatggaatttctctttgcacctgaacaattcttcaggcatcttctccttttaattttgaagaatgtgatacctttctgtcagaaaaggtatccaggtcttagattcacactcaagccatgaataatactcttctgggcatacataaatacacgattttcccaaattctccttctcctagcacagagaccaaagccttcttccttccctttccctagccttctttcaaattctcacctttcctggcatttgtttacttgctcaaccttctaacaaacatttatttaacaaacatctgctatgatccaggcactgaactaagtgacacaaaggtgagtaagacacagtccttgccgtaagaagttcatgctcttatgaagcagaccagttatcagaccattacagtgcatggtggaagggcagagatagcgttaagcccaggacattatagggcccctcaaaaagagccaagtcaccccactggggaccctgtctgtttcccctcactcttcaggttctaggtgttttcagagttgtgtttctttaaagtgtttaaatagtttcctttctagcaacctcccccatggataacgacgtagaccttcccaactcccaatctgaatcattgtattacttccaggccagcgactcatatattcctagactcatcaacttctcatcatccgtactaccacaaacatcagaatatctaaaacccctagagtccaatccactccagtccatgtttgagttttccaaatccacatgtcatttgaaggtgaattttccatgcattgtgttttgaaatcaacagacatatacttaatccttttgcctcagtttctgatcatcataaagacaggaaaaacagaaatcctcagttcattttaattctcttagtcctcaacgtgatattcgttcacatccttcatgactggcctctcttttacctatctggttttgaattacattggctaacttcagaaaagtcatcgttactaaattgtctctgaaagaaagtaattgaggcagaagatatatgcagttcttcagcaattgtttgagctgcactgtcagtgtagaaataagcagcctaataagaggtcagatacgtggattttaaaagcctatttatcatacagtattcaaaccctttaatcattttataagcctcacattaaatgtcagttgtcattctttttcccatcatgattacttaacaaaccaaaataccattatgttgttccttttctagaaaaaaaaaatgcttcaacgtgaaagaaataaagctacagagagacagggctggcgcaggggatctggacctagagaaccagcttcaaattctgctccacaacctatttattgtgtgatttgaagccaattatttaagttctttgagcttcagtcccttgatctattcaaggaagataataataatctctgccttacagtgttttcaagggtgagtccacacccatccttgagtgaatcatcaccttggtgggctccatggcaccctcctcccccaccccacccccggccggccctcctttctgaagcagcctctcccaccctgaggtgccccaccctccaagtttcctgctgctctgggcactcctacatctctgcaccatggcccacacacaccggagtcctggcatctcagtcctagtcttcattcttatttagtagcctctctttaagatggttcatccacactggcagcttccattttcagatgcctccaatctttcatttgaatatcagacctttataggcaactattcacaccataccttcttttggggggtatctcccactcaacaggtctaaatgaagtttgagtcctctcctaaatctagcgggcttcccatgttcttattctcagctagtggcactgccactcatccagctgtgcgagccagacacccaaagagtcatcccagacccctcacctgctccccaaccccagccatcacaagccctgtccattctccctcctaaagagctcagaaatatgccttcagaactacgtcttcattggaccaccccggtctgaggtacaacccacctatttcctaaaccatcccatcgtactcactgccgtgccccagcagagcgcccttctcaatgcacagatgttgtggtgtcatttccctacttctgtcctctcacagctctgcattgctctttgggtcaaaaataaaatcttttttttaaatttatataaatatatggggttcaagaacaatttcgttacatgcatagattgcataatggttaagtcggggtttttacatattcattatccaaataatgtatattgcacccattaagtagtttctcatcctccaccccctcccgctccctcatccttccaaatctccattgtctattattccaatctctatggccatttgtacacattttttcacttccacttacaagtgggaaatatgcaatatttgtctttctgtatctgggttgatttgctcaaggtaatggccttcagttccatccatgttgctgcaaaagacatgatttcattcctttttatggctaaatagtatttcattgtgtttatatgccacattttcttcattcaatttaggatatttaggttgattccatatctttgctattgtgaatggtgctgcaataaacataaaagtacaggtatctttttgatatattgatttcttttcctatgggtagatgcccagtagtggagtggctgaatcaaatggtatatctatttttggctctttgagaaatctccatactgttttgcacagaggttgtactaatttacatgcccaccagcactgtttaagagttcactttctccatatcctcaccaacatctgttagtttttgtctttttaataatagccattctaacatttgttttcttagtattgagttgtttcatttccctatatatttttggatattatccccttatcatatgcatggtttgcaaatattttctcccattttgcaggttgtctcttcactctgttgattatttcttttgctgtgtagaagctttttagtttaagtcccatgcatctgtttttgtttttgtttttgtttttcgattggggggatggagtttcgctcttgttgccaggctagagtgcaatggcacgatcttggctcacttcaacctctgcctcctgggttcaagagagtctcctgcctcagcctcctgggtagctgggattacaggcgcgcatccccacgtccagctaatttctttgtatttttagtaaagacgaggtttcaccatgttggccaggctggtcttgaactcctgacctcaggtgatccacctgcctcggtctcccacagtgctgagattataggcgtgagcctgtttttgttttaaaatccttaaggagatgtacacgaccccacaggacctgaccctggctcccggccagcctcacctcccatggctttcctgcccctgtattacctcacttccttcccctttagccatccttcgggcctcagttcaagttcacatcttcaggatggtagtctacgaccccttataccagttgagaccatcttttaggcattcctacctcaccacttgattttctttcagggtatttagtacatttgctgttgtaagataacgtgggccttttcatcaatggcagtctcccgtgctagaatacataatccagtactgcaggacatagctatatattgcttatccatgaattcccagtggcaaagccccagtagaatttcaatacatatatatttattaaaaagtgatttattaattactttttaaattaattaatattgaggtgcaccagcaacatagttaaaactcctcattccccaaactactcagatccatttctggctctgccacatactggttttgtgactttggggaagttatcttatcgttatccctgacacttcctctccaaaattgagtagcttgcataggaaagtcaagaagacaaaagttagcctcccagcaactagctaaacaaaacccacttttcagtcaaaaccaagaatacctatttaatgataataataaaaaagaagaaaccatgctcctagtacacattaattcatcaaaggataataaagaagaaaaagaggagtcacagccacttgtgctctgctaataagtaacagtcttgccaagaccttaggaggacaacatcagccagcacccattttcaatacaggtgactcggtggacctttgtttcccatcaagtccctttcctctagcacccaagcacccctgcagcccacccctgacacagcctggtagcaggtgcttctcctgcaagggaaacagccaggccctgtgccccatatgcaatgaacaaggcagggctctgcccctctcctgcaagcaatcaacacaggccctgaagcatgagatttaattgcttgttcattattttagcttgcaggggctacaaggaagtatggcatttctgagcacaccatccgagggaaccctgggagctgtcagattaaaaaataacaacagaaacgagaaaggagcctctctttagccaaatggcttcaggtgcccgtgactcaatgcaagggcccccatcaaaacccatggcagcccctctctgtttgtcctgcccttttcaattctgtctgagtggggaggagaatgccacaaagagacgagaatttgaactcgcagcccctgagtgcaccaatgccctttttctgcctgattgtatacttgaagtgcctgtaaagtcaataacttcccatggtttcacagcaaagtcaaaaggttaaaaaagagacattgtccttttgaagatgtggaaagtaatgagtgagcaggctgaatcctctgtgggtttaaaagcctgtgccattctgctttaaggtgtcaaaattgccttaaatttttagctttgttataccctgctgctacacagatatcatagaaccaggctgagtctctcaatttggagatcattttttctctctaaaaacttgttgaaatatatatgttagcacagacattttcttaacattttctgttcaaaatatagtattttttcagatgcatcttaagagatcagaatagtcaaacagtagatctctttttgaaaaaaaaaattgtataccatcttcaagttttaagcacaaaggttacagctagtcctcctcccctattttatttccactgttggagcagatttgacctcgtctctctaaaggcagaaaacttcaacaaaggtgagaggactatttaaagcgatgaaaaagattctgaatgaaggattttgccctggatgaagcctgaaagaaatgcagtgcttaggaagtggataaaagtcaatagcaacaattcttggctttggatgaaaacttgaaggtgcacttttccccagtgatatgaaaaacaagaaaataaaaacaaccaaccagagacccgtaactcttctggttctgtggcgtctgtacattcatgtgatagaaacttactaaatcccaaagggtccctggcaaagcccaggctccgtgatgggctgagagccctgccactgcaccaggagaaaaggagtcactaggcttcggatggggaagagaaaagcctctttcctccctcccattccaaaagagaagaaaaaacctggacagccagatacaagcagccttgaaaaatcactctagaggagaaaagacaggaagaatgtcatcgagaaagaaggccaggagaggatgccacaaaggtgctttttctccctcctctctttccacctttcccatagtctcctctccacctaaacgacccccaatcaactctctccagattctactctcccaccggagcctgactgacacattttccaaaagcaggttaaaaaaagcaagggtctcaggctccgtcacatccaactcattcttatgtgccagggagatacagagccacattctgtgtatctgttggattgtgaattaccacttgggcatagagactggtctcaacagtgagattcccctcgtgtaggaaccctcatgcttcagctaggtgcttacaggtgaagagttactcaaaaatcatcatgtagcaaatttggtttccacaccttaaattagagagactcaggcgtgcaccaaggaaacgtctagctatgctcttctccagcctctcaccgggctgcaggtcttagcttttagtatcactggggtgtcccgggcttttgtttgaatggctcaacctggctgcaatcattgcagccgatcgctctgccagcatctgcattgtctgcttcaaaagtcaggctcaccagagagagcaatttcttttttctttttcttttttttgagacggagtctcgctctgtcgcccaggctggagtgcagtggcgtaatctcggctcactgcaatctccgcctcctgggttcaagcagttctcctgcctcagcctcctgagtagctgggattacaggcgcccgccaccacatccagctaattttgtatttttagtagagactgggtttcaccatgttggtcaggctggtctcgaactcctgaccttgtgatccgcctgcttcggcctcccaaagtgctgggattacaggtgtgagccaccgtgcctggccagaggaaacaatttcttaatggaaagaatttgttattagtttaggccacaagcctgaatctttgaaacagcatgactcagatagttcatcactcagagaattaaggttttgcatccctcggttctgagtgaggttttcttcctcttttgagaagagcagcattaaattaccagagccatctcatcggtcattcatttagtatttaccacacctactatgtgcaaaaggcagtgggaagtagaaagattagaaagaaaaactcctgccatccaaggggttaacagcttacagatcttagaaccacacaacttagaaaaaaaagtttaagattatatagagaatccaagtgctttatttcacagatgaagacataagaccctgaactattctataactcctgtggtaaactacagaggcaattcccaaacccaggtctgctgactcaaagaaggactgtgcctttccattctgttcctaacagctaagaaactcctgcatccccagatcccagaggcttatatggtctggaaagctggtgtcgtggtcatcagtcaaaagcactcactgcatacgtacaccatggccagcacacacctggaggtttggacacacacattcacacacttacataatcctcacaataagtgtttgaggcaagaattggtattcaggatgtaagcttgagaagctggggggagtgttaaataacccattcaaggttaaagggtccccgtggtgaattgaggactcaaaactcagtctgttctctgcccctacacaccagtagcctcgatttccaactcgtttggttattccttgttatagactgaatgctgtgtctctctcccaaaattcacatgttaaaaccctactccccgatgtgagaatatcaggaggtgaggcctttgggggtgattagggtgaagccctcatggtgggattagagtctttgttagaagagacacaacagagatgattgtttctcttcagccatgtgaggacaggacaagacgtccatctacgaaccagaaagagggatctcaccagacaccaaatctgctgctgccttgatcttggacttcctagcctccagaactataagaaataaatgtttgtggctgggtgaggtggctcacacctgtaataccagcactttgagaggctgaggcgggtggattacttgaggtcaggagttcgagaccagcctggccaacacagtgaaaccccatctctaataaaaatacaaaaattagccaggcatagtggcacatgcctgtaactccagctactcgggaggctgaggcaggagaatcacttgaatccaggaggccggggttgcactgagcagagatctcgctactccactccagcctgggcgacagagtgagactccgtctcaaaaaaaaaaagaaaagaaaaaaagaaaaaaaaaagaaatgtttgttgtttgagccagtccatgatattctgccatagcaggccaaactgactcatatactccctttgtttcatcttcatgtatttctggcatcctggtttgtaacaaataatggaatcttagaattttagaaattgaaatgttctcagagaccatgtggtccagatctctcattttacaggtgaggcaagtggtccagtgactcatctgtgctcactgcatgagagccatgcaagctctagagagcacacacagagtgagagagacaagccgagatcctgtccccgtaggcactagtgtatccatggtttggtacaacattgggtgtcatcctggttgtcccaagcctcagcagccggtggatgtcaataaggtcacattattaataaaaataagaatgaataggccgggcgcggtggatcacgcctataatcccagcacattgggaggccgaggcgggtggatcacctgaagtcaggagttcaagaccagcctggccaacatggtgaaaccccgtctctactacaaatacaaaaattagccaggcatggtggcaggcacctataatcccagctactcgagaggctgaggcaggagaatcgcttgaacccaggaggcagaggttgcagtgagctgagattgcaccattgcactccagcctgggggacaagagctggatttcatctcaaaaaaaaaaaaaaaaaaaaaaagaatgaataaacaagtaactaacttgatgtaggagccatacatatgcatctgtctactacagagcctcccgcccctctccaagtcctcaccttggttttctggagtcccgtggtctgtctcacaaccacccttatatgtactcaacaccccagacgtcatttgagtgttttcctcaatcatgaccatagctgctcagaccttctctgtcagcatctgcttcccctgaaaagatttctttctcatgcctttctgtctgtgtccacagtgtctcaattgaaggtccttggtcttcaaggaaccaagactacactgagatccattcttgggaagtgcctctccttcaacctccggtaccactcatccataaacaccaacactatttgcctctttgtgtatcataaagtccctcattgaaacagccccttaaactccagtctggaaaacaaacccactgggctacaataagaaccaattttagacacagacatcctcccacttcctcttgaccccaggtattctctgccaaactacaattcctccaggaaatcagcatctagcagcacccccaccaacccatggaggtttgttttgttttgttttttgagacaggtctcactctgtcacccaggctagagtgcagtggtacaaccacagctcactgcagcctgacctccccgggctcacgtgatcatccatgaggcagtttgaagagatctgaagcccaagatagactcaggctggaattcccactatatacaggtcactagatttaatttaaatgtgtcttaaatttcacaaatgatgcaacagaatgaaagatgtaattcaacaaaacttgtccaagaaggtccttggtattttctctcttctggaaatcatcgatgaaaaagcatgttatatgagctagcagaactcagtcagttaagggaaaaaaggtcatttaattgcacaataagaagcataatgtgggcagaaaagaactccctgtttattgcatatgtcaaattatttaggtatctatgagagaaaggtggatgtaccaaaaacctaggctatgtgtaatcattgaaattgagtatcagattgcactctatgcttcctggaagccaaggtaaaaagtaaaataggtaagttatatagttctccactattattcatctcatagagtaacacagcgtctggtctggtctaacagccaaaagcctatcatcacaaaaagaaatgaattaattgcctgggtctctaaataaagggaataaatcaccctagacaacaaggtcttggagggcctcatctgggtggtctctaccacatgccccgcaacagttttccatatgccccgcaacagttttccataatagaaacagatttcatctgacttttttttttttttttgagtcagagtttcactcttgagtgcaatggtgtgatcttggttcaccgcaacctccgcctctcggtttcaagcgattctcctacctcagccccccaagtagctgggattacaggcatgcaccactatgccccgctaattttgtatttttaatagagaaggggtttcaccatgttggtcaggctggtctcgaactcctgacctcaagtgatctgcccgcctcagcctcccagagcgctgggattacaggtgcgagccaccgctcccggccctcatctgacttcttatgcaaagtacaagaagatgtcacattgctttctttcctatcgttttgagaaggtgtttttacaaagacctcctgttctgaacactgctcattctgcctctgatgagcccagcttcctggatggaccacacatgctaccaggcatggcttatgatacccttgagcctggtttatgatgacccttggtgttcattttcctcatcattttcagcctgggccagcttgtctctcttggacatacgaaggtgccttgttaacctctttttaccctctcccatagccagtgcacaaaaaatacttggatctcgggtcattgttccctgaccataggctttgttgagattagaaataactggttctttcaaagagaatgcctgcattaaccaagtatattctaaagatatgtagcaaatgctacatttgtaatcatcataaagctgaaaggaaaaagaaacactgcaaacatactgaaacaattaagcaatgttcgttcctgactttgggctgggaagaatattctttgtgcaccgtatagtcggtaagacaacattctgaggcccacgttttagttagttaccaactcctagaagccaatggaaaatcacagtctttgatgtgtaaaataactgagaaaaagggtgtagagccttataaaatacctgagcttcatctggaccagccaggagcaagacttgaaatcctcttactgaggaaaatgaaggaatgcacacttgccttttgaggcacaaaataaaagaaacctataaaatttgtgtggcacagtgtcccagaaatcaattatgtaattcttagagcaaaaacctgcttataatctgctgtttaacaaaatttttaagggttataaaaggtttattaaaatcttaccatacggtcaaactgattcagattaaatacctttgtctataaggtttgattaaggtttgggtttaacataaatagtacattaatgtaaaggtgaaatttggcttattgggtataaaaatcatacagggagcactgccaaatatgaaatggtatttggctttctttgggctatagttgcataaatatgttattggtatgtgatctgaaataatgggaaactcctataattctgacatgacttagtgtatgttattaataattataagaaaaacctgttgtacttttattccaatgttcaatttatcgaaaaactgaataatatccctttaattttagccaatatgttcacacagataatttcttctatgagattaagatttcacagacctttaacaacttgcctaaaccttcagctttatcctaatttaaaacagtcctttaactctctaaacttaggcaagaaatccacattcccatgccttcttataatcttttaccaaaagtacattctacttccctcccacactttgaaggtaaaactgtttcttcagcagtctcaattacatgttacaatgttaactcttttttttttttttttttttttttttgagatgcagtctcgctctgtcgccaggctggagtgcatacaatgttaactcttagcaacttttatttttggtgaaaaacctggttagtaagtgattttaattatgtaccaggtgtggagcccaggacccagacaaaattagataaaggactcattccctaaggcaggaattgaaccctgaacctgggccgccactgtgaaaagagaaagcatcactacatggttacaaggtcaggctccccaagacatacaagacaagagggaaatctcatccagttttgtttttagggacctgcagcaaaatttataactgaccagtttgctgggccaccttgaacagtcggcttacaggtgtcctaagaccatgttccatcctatgatacccctctttatggcagagcaatacagaaagacacacaaagcacaccagattcactatagcttaggactagcctcacaaatcctttttttccattaatctaaacttttacggaggagataaacaatgatttttaccgttcattcaaccagtttgcacacacagagagagagagacagaaacagacagagagagggagaggaagcattgcttgaggcagggtggggaaggccaggtgctcagggagaccacagaaagacccacccattgcagtgacactgaaaagttcaggcagctgcttgtcagtagaaaagggatattttccagtggtatcatcagctctcgagtttccccttttagggaggaaaaagctccccatgtcccacaatcctatatgtgcctaatcctgtcacccacagccctcagcaaagagttcaaggcagattaatccaaagagaatagcagttaacgtctcataataccaaacccattcttagccaaaaaggactttactgaaaggggcttctaaccccttaaatcttaaaagggaccctaaccctcctaagttgggcctttaacccaaggtaggtcaggtgtccttgccttttatcaagagcggcctctgacccactctgtcttaggagagactctgactcccctaagttgggcctctaacccaattccatcctttacctgggtaccccaccacttacccaaagttggcctatcagtgctgcactctatttcctttgggtcggggggtttcttcagtatcgtcccctcagggttcactagaaaaatgttactggcccccaccacttaccaaaagttagcctttgggtgggggttttctgcactgcagtcccttcagtggtcaccagaaagatgctacaggaaaggagtcccaatccagaccccaaaagagggttcttggatctcatgctagaaagaattcagggcgagtctttggagtacagggaaagcaagtttattaggagagtaaaggaataaagaatggctacgccacagacagagtagtcccgaggctgttggttgcccatttttatggttgttaatgatgatatgctaacaagaggtagattattcttgcctcccctttttagaccatatagggtaacttcctgacgttgccatggcatttgtaaactgtcatggcgcttgtgggagtatagcagtgaggacgaccagaagtcactctcatcaccatcttggttttcatggctctcagccagcttctttactgcaacctgttttatcagcaaggtctttaagacctgtatcttctgccaacctcctctttcatcctgtgactgagaatgccttaacttgctgggaatgcagcccagtaggtcttagcctcattttaccaagcccttattcaagatggagttgctcaggttcaaacacctctgacagtagtttttaactcttagtaaccttcatttctagtgaaaactctagaaagtaattttgaattgtttcgtatcagttatttgtagataaaaaccattttataattttttagaaatatagttcttcaaattattttttattatcagatctaaatatatttacttttctatactatatagaaataatatgtcaaggtatatggacttaaatcatgtttaataatgaatattccagtattttagcttgaacatgactcattttctgattttttgtattacttaatttaacataacatgactcttggattttaaattacagaaaataattttgagtcgggcgcagtggctcacacctgtaatcccagcactttgggaggctgaggcggggggatcacgaggtcaagagatcgagaccatcctggctaacatggtgaaacctcgtctctactaaaaatacagaaagaaattagccgggcgtggtggtgggcgcctgtagtcccagctactcaggaggctgaggcaggagaatggcatgaacccaggaggcagagcttgcagtgagccgagatcgcaccactgcactccagcctgggcaacagagcgagactccatctcaaaaaaaaaaaaaaaattttgaggctatgacataggcagcctccctaatgtctcctcccagccattctaggtcccaagaagccatgtgccacccatgaggactatgaagatcagggcctctctgagtccatcagaacagaagccagagctgtgaaggctatacttggagaatccaacccctcccacaatagccaggagtcaaaacagggaaagcagaggaagaaggggccatattgggcttgtagctggtggtctaggcaccaagaatgcgtctccagatgtcatcttggccacctatccagacccctgaatccagagactctaaaccaaagacataagctcacaatcaaatcaagcgagtatctaattatatttaactgatagttttgaagccatttttattttatgaacgaattaaaaactagctttatttaccagataccacatacacataacatatatagacatacaaacgaacagaagcggatcctatagcttttgccagtttttaaatactttttcttttctccatttggtgtatcaatctttctattacctgtttcatttccctaagcaattgttaactaggcaacaaatttgcatttctaaagagagaacttgccacaattcccagttgctatgagagggaaattgacacaatcccttaggtgaaacaaaaaaaccatgtatatttcataagcacagagctaagattctcggcctaagtattgattcatcatttgctcaaacccagggaaaaaaaaaaactgctcaagtaaaagttcacttaagatagacagaaaagcaccttaaacaaaggcattactgattatttaaatttaaaaaaaggttagagtttctattgtacattggcagacatccctacaaattgagatttcctttatagatgtaaatttcctttacaaaagagtttcaaggtagccaattaaattccagaaaggtgcattttatttcaatagggtgtcctttttaatgtaaccactgtttcttagttaaaattactgagttcagggtggaacccattagggaacagagtcaaaaaagcatcctctatggctggcctcccgcatggataggtcggaacaagaagcaagcctattttacctgacggcctaacttttataaataccttatctaggatagctttctttccacctttagggtggaatagtaactaagcaaagattagcagatttaatttttcttatcaattagtttcttaagctttttatttgcctttcataaaatctttaaataaaaagattgaaatctttttagaagcttctgcatatcaataggcatccctagatgagactaattcaggaggcctcattttcaaatgcatttcttcagtgcagtgttgtttatttggaaccttccatggtaaattatctttagtaagatttcaccatttctgtaagactttgctgcttctgaggcctcatacttatgcatcgtgaaaggaaaataaatcttggggccccaaaatcactaagctaaagggaagagtcaagctgggaactgcttagggcaaacctgcctcccattctaattcaaagtcactcctaagctcactgagatgaatgcatatctgattgcctcctttggagaggttcatcagaaactcaaaagaatgcaaccatttgtttcttatctacctatgacctggaagccccctcctggctttccagacctaaccaatattcatcttacaaatgttgattgatgtctcatgtctccctaaaatgtataaaaccaaactgtgctctgaccaccttgggcacttgtcatcaggacctcctgaggctgtcacaggtgcgcatcctcaaccttggcaaaataaactttctatattaatggaggcctgtctcaaatatttggggttcacagcatgtataagccagaaggtactcagttcttccaaaactaaaggttccatctttacctgaaatattggctttggagatcaggttcccttaatcaacttggctaatcatttttttccctatctaagcctgcaataaaaatgaaacaaagaggagaatagaaaaatccccatgaatttccaaaagccaaattttacaccccctgcaatattgccatttactactggtttctttctgtcccagtcagacataagaggcctataactggatccaagccagctaattatcagatccaatccgaccccttagataggaatttgagcaagataaaaaatatcagagcttagtcctcagtgggtccagtgggtaccttgcttagtcactcagcactcatgggggtcatcagaggatctactttggatctcacttctgatgccacctattaaatgaaaaaactttggctgaattaaatttaagagtttaatttagcaaagaacaatttgtgaatcagacagcctcctgagccagagtaggctcagagactctagcgcagccacgtggtagaagacttacaggcagaaaaaggaaagtgacgtgcagaaaacagatgtgaggtacagaaacaaccaaattggttgcagctcggcaggcatttgccttatttgaacatagtttgaacagttagcccttgattggccaaaacttggtgattggcacaaaagtaggcttcagtctgtttacatcttcatttaggttaaagttcactatgtacagagaagcctttaggctgaacttaaaatacgttaaaaggcagctttagtctaaacttgatttaacaatataaagaattgaggcaaagagaatttcataacttgctcaagatcacagagaaatgagaaacttagaataactctcaagtactcggactccagactggatgctgttaacctcccctagactctcatgtctatattgcttttggcctataactttttcatgtgtgtgcatgaaattgtgaacttcttttcagtgatagtcttgtgttcttattttattacactttttagttcttcttgaatatggctgcaccactctgaacacgcctgatcttgtctgatctcatgaagctaagcagggtcaggcctggttagtatttggatgggaggaatagatcttgaattttataaatagcactcagacatctatttttatgcttatttttaaatgtcttgataaaatgtttgactactattacattcttgggaaaaatctcccttttttgtgttacacttttaataatcactagattttgtttgctaaaatgttatttagaatttttcatgtatttttcactggactgtgatttttctttttatataacatcttttttaagggtctttgttaatattacactcaagttttcttgttttctttgccctgaattcaagcagttaaaaatccatgggaaatagttttccttgacattttcttttttttttttttttttgagacagagtctcgctctgtcacccaggctggagtgcagtggcgtgatctcgcctcactgcaacctctgcctcctgggttcatgccattatcctgcctcagtctcctgagtagctgggactacaggtgcccgccaccacgcctggctaattttttattttttgtatttttagtagagacagggtttcactatgttagccaggatggtctcgatctcctgacctcgtgatctgcctgccttggcctcccaaagtgctgggattacaggtgtgagccactgcgcccggccttttccttgacattttcaaagaactatgcatgtaatattatagtgactgttcacccagccccttgccctaaagcctggtaacatgattaactcatgattcctggataaatgctatgttctcattcctccatttttatctatacgtaaggctcttggctttgaattttatttctatctctttgtttggttaagttcatcttggtaaaacattagctctccccgcatttgttctcagttctatgatgtagagttgataaactttcccagtaggacagacacatattttgcccaatgtgtgttctctgtaaatgcaggtgaggaaggaggggtaattagaggaaacagaattagaatctctagggatttgagcccttaaacaattctacgataaactacaatttatacaatattttctgagtcatgtagttttgtgttggattgctttcggtctggtagaattcagctgggaaaccaactggtccagggcttttttggttggtaggtttttcattactgattccatttcagaagttgatattggtctattcacgttaacagtcttttcctgattcaatcttggaaaatcgtgtgcttacaggaaagtatccatttcctctagattttctaatttgtgtgcttagagttattcataatagtttctgaaggtcttttgtatttctgtgggaccagttatgatactgataaaaaaaaaaaccacctttttcatttctgattgtgctttcttggatcttctctttctttttctttgttaaactggctagtggcctatcgattttatttttttgaaaaaccaagtcttggttttattgatcttttgtatggatttttacatgtcaatttcattaagttcttctctaatttcagtggtttttcttctgctagttttggattttctcctccctagttcctttcccttagttgacctagtttcttcctttccaaagatagattgttaatttgagatttttttaacttcttgatgaagacatttagggctataaactttcctcttaacactgccttggctgcatccagagattttggtaagttgtgtccctattttcattaatttcaaacgatttttttgatttctgcctcaattttgatgttgacccaggagttatgctagagtaagttagttaatttcatgtatttgtatagtttgaggcaatcttgatattgatttctactattattgtactgtgattcaagaatgtgctttggtatgacttcaatcattttgaatttattgagactttttatgatcaagcatgtggttgatcttagaatacattctgtgtgcagacaagaaaaatgtatattttttggttgttgggtgtagtgtcctgtagctgtctgagatccagttggtcaagtgtcaagtttaaatccagagtttcattgttaactttctgccctgatgatctaacgctgtcagtaggatgttcaagcctcccactagtattttgtgtttgtctaaggtttttcgttggccaagaagaacttattttatgaatctgggtgctccaatgttgggtgcatatatatttagaacagttagggcttcttgttggattgtaccctttatcattatgtaatgccttttattgtccttcttgattttttatttaaagtctgttttatctgatataagtatagtgactcctgctcttttttcctctcagtttgcatggtagaattttctccattcttttactttgagcctgtgggtgttattatatgtgacatggatttcttgaagcaaactgacatttggggcttgtctttttatcaggctttccactctgtgacttttaagtgggcattaagcccatttatattcaaggttactattgatgggaatgattttaattttgtcattgtgttgttaactggctgttatgtagacttaattacgcagttgctttatagttcttgtgggctatggtctgaagtgtcttttgtggtagcaggctctttcaattctatgtttagcactccctcaccaggtccccctcaccggggacctgaggatctgaggactccctcaccaggtccacttctggggatgtcttgtaagtctggtctagtttaaatatactccctcagaatttgcttttctgagaaggattttatttcatcttcatttaagaagcttggtttggcagcatatgaaattcttggttagaattttttttcttcaagatgctaaaaataggcccccaatctcttctggcttataaggtttctgccgaaaggtctgctattagcctgatgggttccctttgtaagttacattccccatctttcttgctgcctttaagatgttttcttttgtgttcacttcagtgaatctgatgaccacgtgccttggggatggatgtcttgtatagtatctggctagggtcctctatatttcttggatttgcaggtcaacctctctaatgagtttagggaaattttcatggactatgtcctcaaatatactttccaagttgcttattatttttctttctcaagaatgccaatgagtcatagatttggtttctttgcataattgcatatttctcagaggttttgttcatttttctttattttttctctttatttttgcctgactgagttgacttaattaactgtcttcaagccctgaggttcttttctctgcttggtctattctgctgttaatagttctgcttgtagtttgaaattctcgtagcgaatttttcagttcaagaagttcaattttgggtctttcttaaaacggcttcttagtctttcaactcttgaatcattttactgaattgctttgcatccttggattgagtttcaactttctcttggtcttgataagcttcctagccatccagattctgaattctatgtctgccatttcagacatttcagactgattaaccattgctgggaacctagtgggcctgtttggaggtgaggggacactggctttctgaattgccagagttcttattctgatttttttcccatctgagaaggctgggttcctttaactgtgatggtaatctagcatagtcagttggctttgtatccggaagttttcagagggctaaggctctgtaagggtctttgtggttgaattcttgcccttggtttatcagcagggagaagtggcagagtgacttttttgttgttgttgtagtttgggctgcgatctggtagatagtgcttgagagcaatggatggaagacgggctcttacttggcagcatggctcctttgtgtatccttggatttgcagctatgctctgtggtacaagggggagagaggtgaccccctcaccaggtccactcctggggactgggggagccatctctgatcgctggcactttgccagcaattccaattatttatttatttatttatttatttatttatttatttatttatttaaatttgatgtttcagcctcggggctcccttggacagaggtccagtagggaaataggccacatctttactggacctgccctgtggaggggaggcacatctaggttctaggccaacttgtgaaccagtgcaattcacccttctcagttttctgggagtgtggggtcctccccaacttgagtgcagagcacagatcctggctaggtaatcctgagccatgggccaggaccctggggtgccaggacctgcttgcagctcccttctccagacccttgggactgggtcccaggtgcactataggatctgaagggctcccaggcttccagaatgcacttaggtggcacaaagcacccaggctgggcagtggagctatgctgtatacaggcttctgcagggtggccaggcagaagacttgggaggggctggcaggcaggtggcctgtgagacagatgtgccccagtcccacagggaaggtggccctgctttctccccagtggttagctagggccagagactgtcaaagggagataggcagcccttggtggggttaggctccgccaaagctgtccctagcacaaaggttcctggcgccatgcctgtggcagctctgtctctgtctaatctctgaagacatccacctaccagctcaaatgtccgtggcgcgtgtgaggtctccagtctccaagtcccttcacttaccctttcctcagacaccgctggaggccaggaagcagccttagcattcagttacccgcacggagtttccagcttcctccctcttcagcctcagggtctgcatcttttctacatccacattcagcatcttctttacaaagatctgttgaaattatgttgatttagtcaaaatctcggcctctctccatgggagccacacttcccagcagcattgagttggccatcttaagacccagttggtgtataatttttaaatatttaatagaaactttaaaatatttgaaaaattaatcttacattatcacactgcccattctgaattgtcagcttccatgagtgtaatcattagcttaactgtctgtactatgtattcttcaaattaaaacaaatgacatagttatttggaataattttttataaaggtggacaacacgatgtttctgtagcgttattaaattactagttatctagttatctaacttggacagcacttagcaagttagataactgacttgatagtttgtaaaactaatctcattgacatttcttctagtccagatattattttctccgataaacaaccattgtttataaaatcactgtcaaggaaagattaaaatagatttaatgaactaaaagaagtagaaggtttgtttattaagaggaagagttcagagatctgagctcaatacgagtacacatcttaaatgaaataaagggaataatgagaaagaaagaagtcaaatgaatatctaaacatgtttcatcaaggaaaatataggaaaaacatttgcctatatattcataaaggcaaaatgtaaatatctaattaaagtgcagttgtaaagaaggacaggcaatacagctttattaacatacagctgctttttactggttatccaacatccttgatgaagattagattttatcacccaccatctcctcagggtccacctgcgaggtggtgggttttgcaagttgacaaacacaactgaactttatctattattcacgttgggtttctatatgaatttctgtgaataaagttttctattactaaatttttaatagtaaaattgagaacgtttttcttattgccattattttttcttttctttttatacattattttacagcatcttttaatgctgtcaatctatagaagatagaatgttgttgtatttccttacaggttctactgactttgaagtgttctgaagttgaaggttatgattctttctcattttgtttcaaaacagggtccccatttccctaacgtaggattcgagggcacaagcagaggaggaaaggggtgtcaaagtcagaaccgcctagaaggcaacgagaagcagaagcgcaggcctgcgagatgctcatcagagtgacttagctgtgggctgcggaaagcaacggaaggaactcacatccactggccgcattccgctccccggaacggaggacagagccgagtttcttcaggcagtggctccggccaactctgccccacaggtaaggagcgcgcagctgccacacaccgcaggcagcgcgaacacagactcggccttcctagggcgccggcgtgttgagggcgccgcccccgtcgctgctgggagctcggcaggcccgtggccttctgcctggttctcccgcctctgcaagcctcgccttcaggactccgcctcgccttcctcttttctgttggacagactcacgggaccgtctgcctggatgatgtgtgcacatttcttaccacgattcctctgcacaccaggtccagggactgccgcgctagggacggcacagctgaactgtgcaggcagcgaaggggcctcacggggaccgctcagctccctgagggcgcagccccccctggtcgggggggaataaacttccgcggttttcagtgacccagtttgtggcacggcacaggttgaaaagttaaaatctgagcgcgttaacttcagagatgtactgtgagcggctttgtgcagcgaaatgacctgtttaccgaacagcgccctctgtagcccagtgctcagaacgggccttttcatgatgttcctgcgttgtgtttacagcctccctgtgagggggttgcgcgcacaggtggacctcgttttattgcgccttgctctattgtgcctcgcagatactgcactttttttacaaattgaaagtttgtggcaactctgttggggcacctctatgggtgccatttttccaacggctcgtgttcacttcatatctctgtgtcatatttttaattcttgtaatatttcgaattttttcattatcattatatccgtcatggtgatctgtaatcagtgatctttgattttactttgtaattgttttggggaaccaacgaccgcacccacgtaagacagaaaacgtaataaatgtcacgtgtgttccgagtgctccaatgaccagctgccccccatctctctccctcccctcaggcctccctgttccctgaaacgcaattgtgggattacaccattaataacctacaacggcctctaagtgttcaagtaaaaggaagagacacacatctctcactttaaatcgaaagctagagatgattaagcttagtagggaaagcctgttccaagttgagataggctgaaagcaaggccttttgcacccaggagttagcccagttgtgaatgcaaagaaaaacctcttaaaggaaattaaaagtgctgctctagtgaacacatgaatgacaagaaagcgaaacagccttattacagtggtctagatagatcaaaccaaccacagcgttccctcaggccaaagcctactccagagcaaggaactctcctcagttccacaaaggctgagaggagtgagaaagctacagaagaaaagtttgaaagtagcagagattggttcatgaggtctaaggaaataaaccatgtccacaacataaaagtgcttccctccaataaaatgtcatgaaataagaactttttacaaatgtgctcattgctgattccctagccctaaaacaatgcctgccacatggtgaccattgaatagctacgggatgacgggtcagaaggggcatcaggatgaatgatcactcatgaacaaggcaaaacaaaggacattttcagatgagccaaaattgaaagagttgattgcccccatctcttcatgctcgtcaactagaaggaaactgtgcccaagaaacgggaaagaagcgccccaaattctgcataaatttaaaaagtttaaagtaaacactggctatgtaaacaccacagtgataatcataactaatactgagggtaaagacaacttagagtaaaaatcctggcagaagccaacacaatgacatgagagattggggaggagaatcagaactagaagactcttgagttggttgtagaggacggtaaggatactgatacattttcagtttatgaaataaaacctcaggttaaaaggaaagttattttcagattatataattttcttaatgtctgtttcttataagatcatatttaaagataaagatttagaaatagcaaaagagaaagaatagaaacaggcacatattaactaactaaaagaaagctgctatacctattagatttaatagacttaaagcagaaagcattaaaggtataaaaataggtgtcactggttaaggatttttaaaaagaaaccaatttataagaaagagaaaaattacaaataaatattagtaaattcataaccgaactaggatttatttatttatttttttttgagatggagtcttgctctgtcacccaggctggagtgcagtggcgccatctcagatcactgcaacctccgcctcctgggttcaagtgattgtccaacctcagcctcctgagtagctgggatcataggcgcactccaccgcatccggctaacttttgtatttttagtagagatagagtttcaccatgttggccaggctgatctcgaactcctgacgtcaggtgatctgcccaccttggcctcccaaagtgctgggattataggaatgagccactgcgcccggcccaaactgggatatttttaacacagttctctcattacctaatgcagtggtccccaacctttttggcactagggaccagtttcatggaagacaatttttccacggactggcatgggtgtgggttgtgggggggttggctgattacgttcactaaatttactgtgcacttcattattatattgtaatgaaataattataaattatacaattcaccgcaatgtagaacaaataggagccctgagggttttttttgttttgttttgttttgttgttgttgttgttttgtttttgtttttagaaagcctcacactgtaacccgggctggagtgcaatggcatgatcttggctcactgcaacctccacctcccaggttcaaacgattctcctgcctcagcctcctgagtagctaagattacaggtgccatccaccacgcccaactaattttttgtatttttttttttttagaagagatagggtttccctatgtttaccaggttggtctcgaactcctcaccttgtgatctgcccaccttggcctcccaaagtgctgggattacaggcgtgagccactgcactcgaccgccctgagctttttttcctgcaactagagggtctgatctaggggtgaagagagacagtgagagatcatcaggcattagattctcatgaggagcgcacagcctagatccctcgcatgcgcagttcacagtagggttcgcactcctatgagaatcaaatgctgccactggtctgaaggaggcggagctcaggcctaacggagcgatggggtgtggctgtaaatacagacaaagctcccctgtcttgcccgccgctcacttcctgctgtgcagcccagttcccaagagacccaggggttacctagaggatggcgttttagagtccaggtgagaccgggaaagaatgtggtggcttttaagacaatgagctgactgcactgtgcgagtaagtaacacccatttatctccgttgctgctcgagccatgtagccaggcccacccagaaaagctgaaacacaagccccagactgaggtctgacggcgtttacggaggcatccagacctgggtgcgcttacacaccggcacggaagccacaggctcacagttcttggataagaaccaggaaaacatgcattaagcagggtaagccccaaattatctggacagctgctgctgtggggaacttgcctccagggctcaagtatctgctaacctgcaagtccccacacctctgcacattcgcatgcaaaggcacctacccacacgggttcctggtgacgtcactcacctgtctgcttgttaagaaactgcacaacttccaaaccatcagggtaggtcgtgtgtgtcgtctgagcatttgcataatagtaaacctgtaagcaccagaaacacctatgttgggaggcagtttgtgttatcattttgaacctggatttaatctagtaaagtccttcctacaggggggtaaaagcaccgtcccagcaggtgggagtgggctgaccttgtccatgggcatcctccacagcaaggaggcgtggggagagggcttgtcacccaagcccagaagtcaagacactgtggctctaggctagtgggagagaggactggactgaggtggaattcccagtccttcacctgggagaaatgcaccttgcgctggcattttgcagcctctgcctctaagtcggtgggcacggctgagccccggacagtcagcaccaggaatttggaccatgttttgtgttttattaaagtggttatctcccacttatatgtttgctctggggtcagggtggccacagtgacaaccgccacattcaacacctgatacaaataacacacagagacatacaaataacatacaaataacacctgccatgactgtggcactgtttctaaatgcagatcattagccctgaggcttccaggcaaacccattagctggatccccaaacaaaataaaatcccaagaaaaatgttcccactcgtccccccactgaagatgttgaaaagggcagaacagaatgtgggtttttctcgggagaacagaaaacaagcgggacctgtgttcccagacttccccgccaggtgcctacttacatcacacgtaagttcacagcccaaatttcctgccgtagagaaaataatttcattttattgacattttttgtaaaatatagcatgttacaagtggaccactagctagggcttagaaatatgtttgctattcgtgccttcgagtctattaatgtcaattgagaactgtaaatcaaaatgataaaaaatgaaactttgacttgggaaactcttaagccatgaaaaatattaatcctgtttgactatgtgctaaatgcaaccaacttaaatctataaaagaaagtctctgtttgaaaggctgaacctcaggaaataaagagacatttggaatcatcttaattttctgttcttgtcaagaagatgcaaccatctcttgacacccactccgaatctcacttccccaggatgaaaaggtgagcttctcaggtctccctcaggggaacctggcgggccacccttgcagaagccactcagcccacctacctgcagctctgcaatgtttggggaagaagcagtgaactcatcaggttgaacgtggctgagaaatccaccttcagaactctctaagactgaggagcttccgtctaaaaagcaaataagttaaatttaaaaggatagtgtatatacattgtggaaatatcagtatcctaatgcgattgctaaattcaatttaagcaaacgtgtgaacacattctttcttgttcatgagattactatacacatgtcaggtcagttcaacaacaaatgatcctgtaaggaacattaattctttaatgaatacactcagtcggtatttctctttcgagtattctgatggatcaggagattcacggatggaaaggcactgtcttggccctgaagctgctcacagtcccgcagcaggcaaacacagaagagaaaagccgaatccctgtgacactggcttacgggacctatgaagggccacgggccattgtgaaggagcaccacaggcttccaggagagccaggagtcaggggagcttccccaggatggcgtcactgtcagctgagatgatgcctggaggttgcggagatactagcaggtgtgtgtgagaggcaaggtcccccattctgcccggcaccagcaagtacactgaagtcttgtccgggggcctgaaggggaggggacagcaggaacaaggtagccaggctggagcagacctgatgggaagggcttccctgccccacagagaagtgcagaggggactgtgagggcacgcagagcctgaggtggtctgaagcagacagatggcaccagcctcacctctacgaagctccctgcagaggccatgaaacagcctgggggtgggcaggaagcccggggggcagactcaggaggaagacagtgtcagattcggccctgaagggccacgcagacctcggccaaggatgggaaggagtccaggtgccaggcagcccagggcgagtggtgcccacaggcttgggctgtgctgtgcataagggccacacctgaagctcggccacacctgaggctcggccaccacataggccccgtttctttaccaagataggttcctgcagaggtcgtgaagctgctgtggtcatttgctggcagcgacgtgaagatagaattctttcctgactcaaccaggggcactctcgtctcctccccgtgagacccgcaatgcaggaagcacccacagctgcatggacagaactggggcctgggaaagaggccaggaaggtgccagatgagagggcgctccatcagggtggcagcaatgccatgggctggcaaatggagaaaggggaacaaagcacccaagtgcatctagccccagccacacgccttctgctgggagtgtgctcagagggaagtgaccgctaggattcggaatctccagtcacggcccctggagaccggcatgtgggctgtgtgtggggtggagggctgggggtgttggcaagtctcacaggtgaggacccaacgagggaatcagacaaaaagtggccacaaattaggcagctccaggaaggacatgtccttgccatagtaagatgttctgctcacgcgtatccacgagaaagccccgcatttcacggggagcatagaaacaggagtccccaactctgctcaccagctcctccggctgctgccatctgctcctgcagcatggcggcctgggaagcctgcactggtgattttctgccactcaagttttgcagacttcgggaagatggatgcatagcctggggcaatgacagtcacaggcccgccttgtcacaaggtccctggagcgggcaatgccttgagcccaaaggctgggagcacaaagccatcttcagccatcctcgatttccagcaagaccccagggctcacccaacagcccgacactccatactacaaggtgggttaatttttttaaagactctgcagaaatataccaactacagagctcaggaaagcaactgatttataaaacccaatccaagttgtttgcttttatagcattagagacatgtctgaagaacttcaagtttttatctatagaaacataattagtttaataaattactaggtctattttgaataacaaattgagtacttttattagacctaagtggaactttatctgaatctgaattttccaaggggccagtgtagagtgacacaggtgtccgaggccacctttccatcttcagacacccccccgtctctctgcacagggagttggccttccagtaggtgttgctcttctgtcttgacgtctcctggaaagatttttatctctattttcctgtggtggtgttttccacgagctaattctttctatctttaaactcattggctgaaaacaaatgtgggaatatttttgcattagtaacaattatattatttttaaatgttaagcaacacatcataccagctatcacagaatgtagatgattctactcccccttcctacagaaggacacatgaggtatccacacttagtgtctctcattccccattttacagcccacgctcttgtgaaatttgggattccaatacatggctgatattgtaaagtcaacagtgaaataaagtgcttgaaactcaattcaaaaatgcataataaaaataattttctacattttgcactatttaacaattgatggtttcaaggcgtggataagccacccattcagttatctatttactcgtacattgccccgcatgcctgtgattaactcaggtcaatgatggagcatgagagaagtccgcgtctcacaggaggctgggcctgtgcagtccaccctgggacttacgatgttttgtactcataggatctgaaaaggctcttttcctacttgtgacaaatgcttggagtagatttctgatcttccttcagggaataaagtgttatctgctcagcagttgctttgggaaagaatgcgaggggataaatcatcttcaggagttgggggcgccttctccatccacatcaacccagtatcagttgctggctgtggactcacgagatttgcttcctgagtatgagggtgacacaaagctgggacaggaagagacacactggctgggagaatgttctaaagaggagctaattttaacaaagaaaaatgtgatagagactgccgagaccagctcggtcaggaagaccctaacccagcagtgctagaggaattaaagacatacgcacggaagtatagcatgtggagtgggaaatcagggcactcacagccttcagagctgagagccgtgaacagagatttacccacatatttattgacagcaagccagtgataaattgtttctatagattatagattaactaaaagtattccttatgggaaacaaagggatgggccaaaacaaagggatgggctctggctagatatccacagcagaaacatgtccttaaggcacagatcgctcatgctactgtttgtggtttaagaacgcctttaagcggttttccaccctgggtgggccaggtgttccttgccatcattctggtaaacccacaaccttcagcgtgggcatcatggccatcacgaacatgtcacagtgctgcagagattttgtttgtggccagttttggggccagtttatggccagatctgggggcctattcccaacaagagacaaaatagcatcctgtactgtggctcccaagctaacagcgccacccctgttcagaggagtccacgccgacaagcagcaggtgcaagaccgcagtgcagaagcagggagcacgggaggctgcgagccctcagactcacgggtggagacagtgccacacacatcacctccgcagcctgcacccacggaaacaaagcccccaagtcccctcggccccagccagacgcttgctgctgtgagtgtactcagagggaagcagccgggaggacttggaatctgctccacagcaagaagtgctaagggttaggatcttgtttgaaaggcatgtacccgtgtccttggaagaacacaggactccagggagcaccatgctcacccagggaggtgaaattgtgtggtgaggagctgatgggatgtgtgtgtttgggtacagaacctctgcttctctttacagatgataagcacaaagggtcacctttggaggagctgaattgttagatgacgatctttgtcccaggagagtggcactctgattcttgtggccagcgtatttgggtattgtctcttcatcagctgacagaggtgaaatttttccaaaagcaggttccaatgcctaaaagacaaaatgcagggaaattcttcacattttcgaaggtaaaataaattcaaattttaatacaatgaagaataattggaatgtcctagaaaaaaatagggtacaaggtagggggacttggactgggttttccccctaatatgttgataagaacagaaaccctcaccaagcgtttgtgaaggaacctttgtggagccgatgtttgctttgtgtttcttattgtggttccttgtttcaaaatgatcacaggatcccaaaggctacagaacaaacaatccccaacatatcttcctttaggctcctgtgtcttcaaccgggagtgtgttaacggaggaagaaaatgtgatactacttctagtgttgtctctacaacttgtctaagatccaaaatgcaaattcccaactttccctgttatcagcagactgacctggaacagggtgatccttcaggtgggatgaggtatattaggtctggaatgctaaattattcaccgttctgccctctgaggaggagaagggaatgagaaggggagagggttgctatgaacgaacccttaatatcagatccagagtggctcacccacacagccatgcccgcgttctgtgggtgctcgagtctcagccttttagatattcagtccctaaaacggcgactacacacagatacaccttcgcatatttaaagtgtgggattcacatatcccatcctgtttcttcaaatcaggtatgctcttgtgagcgtacatcctgttcttataaatagccccacggtgaccagtgcaatgcacagaatggaaaaatatttggaaattcaccaagctctaatctcaaaataagagaatgatcaaaactgcagggcatgtgaagactgaataagacttcattgactcttagggtaattgttatacaatgacccaaatggggcagtagatactattttttaggaactggcatacaatatatgtagggaaaaaaatccctgtgagtcttcttgggttctccccacagaaggtggacaatcccggccagtatttgtggcaatttcccccactcttcctctgacagaggaacagcctgcccagcttctgctcttccttccgcagaaggactcggcgctttgctgtgctgagaggctaaactcactttctttctgaggcagcagaagccatctccatggaaacaaagctctcgcagagctcccgaagagtgggaataacttccaagatttcccgtaatttcttgtagaggaacttgtggcagttttttttgtttgtttgttttgtttttttcagacggagtcttgctctgtcccccaggctggagtgcagtggcgcgatctcggctcactgcaagctccacctccctgattcaggccattctccagcctcagcctcccgagtagctgggactataggcacccgccaccacacctggctaatgtttttgtatttttagtagagacggggtttcaccgtgttagccaggatggtctcaatctcctgacctcacgatccacctgcctcggcctcccaaagtgctgggattacaggtgtgagccaccgcgcccagctgtggctgtttttgctgtgcttggagaacaaaccacagagcagtctcctctggaatgtattcggtgggtgcctgtgtgtgtgtgtgtgtgtgtgtgtgtgtgtgtgtgtgtgttgtaatcactgtgctgtatcggaaatattctaagtcctggaagtaccgatttaaaagttcacacaataaatgcagctaggaaatgttagtacttttcttaatccactaagaaatatccccacttacgtttggagggtgttcatgtggtttcatgtgttgttacctgtatgtataattttaatgattcaagttatttagatccatatgcaggaaacagaacccagacaaggcagtgataacactggccacattcacactctcttaggctggttctttgagcggtgtgatcaaacgtgaaagctcagtgttctgtagaggcaggctggtgctgggaggcacccactacttcagcatgagaatgctggttcttcgttcgggatagagcaggttagtgatacaggatgggggcaggaaagtcctgggtggagaagaacggggtccctggctagggctcgacccctgggcctgtgcccatggacctacgcatttctgcttttgtgcccaaatgttgcatttcccaagaccaccgtggcctgccacactcccatcctatgcctataaaaaccccaagaccctagcgggcagagaccaagcggctggatgtcgagaagaacacaccggcagaagagcacaccagcagacacagcagacgccagcaggccatcgactggcggaatgacacggagtttgcttggggtggtcaggggagagcccggtcactgggcagcccaactcccaaggggaaaactgccttcccactccatctcccttctggctcccccatctgctgacaggtatcaccactcaataaaaaaccttgcacccatcctccaagcccatgtgtgatctgatttttcaggtacaccaaggcaagaacccaggatacagaaagccctctgtccttgtgataaggcagagggtctaattgagctgataaacacaagctgcctacggaggggtaaactgaaagagctcccgcactgtaacacacaccctctggggcttcagctggaaacattcacccccagacactgccgtggggtcagagccccatagcctgccggtctgtacactcccctagaggtttgagcagtggggaaccaaagaagcgagccacacccccatcgcacaccctgcgagggggacaagggaacttttcccgtttcaacaggtctctattgcattctacacagctgtcctagaggatgaacagaaggacaccaggctactgagctggctctggagtcaccctgggttcaaatcccagctctacgttctccagcccgtggccacgatggggttagtaataggatccatttcatagggtcgtcatagagagtaagaccgtaaagctccgtacctagcccatgtaaagtccacagtaagggtttgctgctgttgtcctgagacatcatgagatgtcttagaattctggacttgagacacacggcctgggggcggcaatgcttctgtctgctggagtgccaggtgagaggcctgatgtatccagttcttattaatcattacttacgggaaatggagttgatggaaagatagcaacccctcccaccacccggagcgtgagtgataccgcgtcattcagcaataaagcccacatctttatggggacgctatttttacataacgcaaacggtacaaaaacataaatgcgcttttggtaccagagtgtgcgattcttgccccgcgtgtggggacgctgcagatttcttcctggctttccaccgctgcagctgcagagctctcagcttttctcggagctccatgttctgctccctcaaagcatctatatgactccggagttttccatgaacatcagcccacagagacttctgtctcccaagctcttggtggagtctgatgatctgctgctgtaatggctgttattgggaagagaacaccagaaaaacctctcagatgtcacaatgggcacatttatctgcaaaatactcaagccctctctgatgtaagaccaacactatttctggaataaaagacacccgatgagataaacaggactaccacagcctttttctttcttctttctttcctttctttctttcttttcttttcttttttcagggtctcactcagtcactcaggctggagtgcagtggcatgatctcagctcactgaagcttcaacttgatgagctcaagcgatcctcctgtctcgacctcccaaatagctgggactacaggcatgtgccaccatacttcgctaatttttgtatttttactcgggatgggggttcaccatgttgcccagactggtctcaaactcctgggctcaagcaatccacctgcctcggcctcccaaagtgctgggattacaggaataagctaccatgcctggccatagctttattcttattaagtagtgtttattatgagttagtccacataatataaccagataaagatggttagtgaattatgatttttttgttaaaacactactacagcaaaaagaggctggcattcttttccttttttttttttttttttttttttttttgagacagtgtctttctctgtcacccaggctggagtgcagtggcgcagtctcagctcactgcaacctccacttcccagattcaagcaactctggtgcctcagcatccagagtagttgggattacaggcacatgccaccacacctggctaatttttctattgttagtagagacagggttttaccatgttggccagactggtctcaaaggctgtactggcatggatatatggtcaatagtttaaaaattatggaagccggccgggcgcggtggctcacgcctgtaatcccagcactttgggaggccgaggcgggcggatcacgaggtcaggagatcgagaccatcccggctaacacggtgaaaccccgtctctactaaaaatacaaaaaattagccgggcgtagtggcgggcgcctgtagtcccagctacgtgggaggctgaggcaggagaatggcgtgaacccgggaggcggagcttgcagtgagccgagatcccgccactgcactccagcctgggcgacagagcgagactccgtctcaaaaaaaaaaaaaaaaaaaaaaaaaaattatggaagccactgcattttcaacctaacatgttagccttcccctgggatccttcactggatcgtagagcctccagccttgctctgagaataagtgggatcgtgataaaggtacagtcctgcactgggtggccctggccacagggacccgtgggactttaatgacagcaagcactgtccaacagggtccaatgaggaagatggtaaaaatcaggaaacttgctgggatgatgtgaggcatgtcaactttctgattttctttaatgaagtttttaaagtctggtgccttctcctggattagaggagaaaagctggaatgttaatattttctttaactccctgccctgcctcccatccaccaagagatacggttgcagagggggaaagagccacatgccccttggagaggaagtacagaatcagtgtcccggggtggtgcattcctacaggggtccagcaagggaaagtccaatgacgggcctcagggacaggaatcagggtcccgcctggtgggactaactctgtccccacagagctcaactcactggcatctccccagtgttgcagtcctccgtgagaacctcggctgccacagctgtcttctccatgacagccccagctcctgggcacgggtcctctgggtgggtgccctctttggggtccctggcctcgagttgacctgccagcatcctggttgggaagggaagggctatggggacacttgaatgcagccctcctaccccgtcagtgtgggctgaaggccccagccccaaactaagggtgagcaggacccgcagccgctccttctccccctgggtcatgtgcacattcccaggcccgaagctgaccaggtgaaaggacaccacagacagagggactgagctgtccacacctggctctccaccatcctccgtggaaaatgctttagatcctagaagatcagcctgacacctaacacactccagtcatccaaagaggggtgtgagtggggtgtgagccggtgtgagtgggatgtgagtgggttgtgagcaggatatgagcggaatgtgaatggatgtgagcggatgtgagcacgatggtcttggggtatgagcaggtgtgagtggaatggtctcagggtgtgagcaggtgtgagtggagggtcgcatgagacaccgagggaattctcagccctttaatcagcacccacctggaggggcacaggcagaccctccaccgtgttgagtatgtgtcttgaaccatcagggtgacatttgtgaattcatggtgaagatgtggaaaggaaacacctttttataggtacagcatttatgccagttctaggaagttcacagcaattagagaacaaaaacgaaagagaaaaacgcaaagctttcctgcaagcctgcagggtcgtctctgaaagctgcctccacccctgccttgccctgtccgttttaggaagccagtggcccccaacgaaaccccgactgtttaattcataaacttctaactgtgtgagaaggaacagtttaaccacagtgatcggagaaatgctatttaaaagagagtctcctgatggaagcgaatcgaaggtctagagcaagacctaccagtaaccagatcactgccattccttccccgcggagactgggaatgtttctgcggaagtgggctggggtcacggtcctcacagccctgagaaagctccttctttcctgctcctctgaggggacaccccagtgtcctcggccccaaactcatgaccccctcagtccagggaagaccctttccttcagccccaccaccagacctcgtcacctcacctggtccccaacagtcactactgccaggatcagatcatctgggccatgtccccacagttgtccccaagccctcctgcctcatatccagagaccagagagcagcggacagttccaacggactttctgtcttaaagggacatgaacgtctcactcagcgtcaccactgtaccagctcagataataattaaacatccccaaacctgcaattcttaatatagaagctcatcgtcagtggagtccatccatccacaaaggacattggagagagtcaaactactcctccaaattgacaaaaaccatgtgttttatatccagtcttcaatacgcaacgtgtagtaagagctcatttctctgagcatacattcttggagaaatacaaactttcttcggatatcaaattatttactagaaaaaacatttttatgaagggaaaataatatatgtgagtttaaataggagacaggattcaaagtttcatcatttcactaaatgcatctccatctgaattgtccgtgtgatttttgtgatagagaagagaatgaggagcaagcaagagtcgatattcctgttaaaccctggctgtccttctcatccatggtgctgcgtgtggacaacatacacctggggctcacctgagcctgcttgggacgtgtgtcacttggatagttctgcaagcgattcgcatgcaataggcagtaaatgccgacgtcatgaatgaatgaagagaatactacaaagaggaaacagaaggcacttttgtccccatgtgtcattctaactgtgagagtgtgtgtgtgtgtcctgaggtgtgcgagtgtgtgtgtgtgtgtcctgaggtgcgtgagaggttgtatgtttgtcctgaagtgtgtgagagtttatataggtttctgaggtatgtgaggggttgtgtgtgtccctgaggtgtatgaggtgtgtgtgggtcctgaggtgtgtgagtggttgtgtgtgggtccctgaggtgtgtgagaggttgtgtgtgggtcctaaggtgtgtgagtggttgtgtgtgggtcctaaggtgtgtgagaggttgtgtgtgggtcctaaggtgtgtgagtggttgtgtgtgggtcctaaggtgtgtgagaggttgtgtgagtcctgaggtgtgtgagaggattgtgtgtgagtcctgaggtgtgtgaggggttatgtatgggcccctgaggtgtgtgaggggttttatgtgtgtcctgagaagtgtgatgaattgtgtgggtcctgaggtgtgtgagggtttgtgtatgagaccctgaggtgtgtcaacattgtgtgtgagaccctgaggtgtgtgaggggttgtgtgtggattcctgaggtgtgtgagggcttgtgtgtatgagcctgaggtgtgtgggttccttatatgggttcctgaggtgtgtgaggggttgtgtgtgtgtcctgaggtgtgtgaggggttgtgcttgggtcctggggtgtgtgagtgggtgtttgtcctgaggtgtgtgagaggttgtgtgtgtgtcctgaggtgtgtgagagtttgcgtaggttcctgaggtatgtgaggggttgtgtgtgtcctgaggtgtgtgagaggttgtgtgagtccctggggtgtgtgagagtttgtgtaggtttctgaggtgtgtgagagtttgtgtagcttcctgaggtgtgtgagaggttgtgtgagtccctgaggtgcgtgaggggttgtgtgtgtcctgaagtgtgtgagaggttgtgtaggtttcaggctttgcagctcccctcctgagcctcagccgggcggctcccagggcagggtccccccatccctgtctctgctgcggctctctgtgtgttgctcttcccggcctggccaggacattttcttcattgagtcttccccagattctcaccctgcagcaaccacgtgcggcagcaggtcagggcggaggctcctgggcgtttggactgtggggcccttctcttctctctgataaggccccggttttctgttcagcctcgcggtgccttagccgcatttcaggcatggtcttccagggccctctggtctgaacattctgtagaggaaaccacggcacacctttcactcatcttttaaaatcagaagccagttcctgagctggctgcttggagtagcagcagatacactttttaaagtagcttatgtgtttaaatttctggttcaaaggactacttctatagtggtacagaccctgacaaaagaaatcaccttttctaaatatcatcactgcaaatgggcaatatgacctgggaactggtgagatgccattgagattggagcccaccccaccagagctgagtgaattcttggatgactaaatgtcggaataagttagggaggggtgcatgtcatccaaagaatgacatgagctcactctgtgcctcaagtgacacagatcatagtagattccagcgaaatacttgcagctgtgttgagttcctcaaactaccacaaaattcttatggcaaaacttgtgagaggtgaagataagagagtgtgagccctgtgatcgaatccaaatatgaattgtaaaatatgccttaatactattaccagtagctgtagtgtacaatgatagaaccaaaagataaagattttcggccgggcatggtggctcacgcctgtaatcccagcactttgggaggctgaggtgggcagatcacaaggtcaagagatcaagaccatcctggccaacatggtgaaaccctgtctctgctaaaaataaaaaaataaaaaaaattagctgggtgtggtggcacgcgtctgtagtcccagctacttgggaggctgaggcaggagaattggttgaacctgggaggtggaggctgcagtgagccaagatggcaccactgcactccagtctggcggcagagtgagactccatctcaaaaaaaaacaaaacagataaagattttctactcattttctagttgtcccgtcagtggtgcatttcagcacactcaaaactccatgtttcttttggattttatgagctgagtctgaatgttataagtgacacactcctttttttttttttcttcttcttgtgagacaaggttttgctctgttgcctaggctggagtgcagtggcaccatctcggttcactgcaaccttgacctcttaggctcaagcaatcctcccacctcagcctccctagtagctagaactacaggttcacaccaccacacccagctaatttttgaatttttggtagagacaggtctcgctatattgcactggctggtctcgaacttctggactcaagtgatccacctgtctcaacctcttaaagtgctgggattacacactctttaaaaatgttctctgtacaatatttcgtaaaggttgagaataaggaaagacattgcccctttaagcaaagtggtaaggcaacatataaaaacgactcaatccacaatagtgagaatttccgttaattacattctaaagtttttttgtttaaaatgaattgagggagtacagtatgctcttcaagataatgaacagagaaaaatgcccaatgactgctagccatcccaataatgtatttactctacgttgtgttattttgtttctgcagtaggacccaactgattagaaaggaaattacatagtcagtgaccagctgagactgagtacggacagaggaagaagctaacttacatctaaagagacctgaagtcaggagacatttctagataaacccctcagccagataacatcaacccatgacttccaataccattgctgaagaggtcacagaggagagagaatcctgagaagatttttaaaatctgaaagttcttgtattaaaagaagtgggaagtttcttggtatgtgtatgaagcctaagattgagatagtggtactgagggtggcatgataccccattgaggctgggagttttatttcttttaagtctttctgtaggtatacctctgtgggttcctgccacttctaaaccatagttataaggccaataaatacataaaacaatcttcctactgctcgcaggcaccatgctcttcctaatagctctataagaaccctttattgctcgtgaccctgtgtccacattatgctatctgattattcataatttttctcggatctgcttgatatgaaacatggatacagccatatttgaaggaacatgttacaggaaaagaaaccccgacctcggaatctgaggatttgtataatttggactttacacaaaataattatgtaattttgggcaagtcccttaatacagtatttgaactcaattttattgccccttttaggtctaaactctcagctgtgagtactaatttgtggcgtgatggtgaggtgaaatggcagaggcccatggcacatcattgcagaatatgcgttagactttcacaagtcatcagtcatgaatttcaggatctggctgcttgtcttcatgggagacgtcaggtacagcttgcaattagctaaggggttcatcttacaatacctctaattactgctttagctaaaagcccccatgaaagacacaagtttaccacatcatatgaacccatggtaaatattttgtgacctgatacttatccagtcagtgctctgttagccagaactaaatagttgccagaaaaatgaaaactaatattcataatactggtcttgaaatactacaaaatcatgggacaaaatcagctagtcgggagactggagtgggaggatcacttgagcccaggaggcagaggccgcagtgagctgagattgtggcactggactccagcctgggtgagtgagtgagacaatgtctgaaaaagaaggaaaaagaaataaagaaagaaagaaagagaaagaagaaagaaagaaagaaagagagaggtagggagggagagagggaggaaggaaggagaaagagaaagaaaaagaaagaaagaggaaagaaagagagagagagaaagaaggaaagaaggaaggaaagaagggagggagggagggaggggagaggtttgaagaggctcactctgcctgaagacaggaagggaccaggagccgaggcgctctcagccccagaaagggcaaggaagcagagcccacctccagcctccagaacgaatgagcctgccaaggcctgggctgtagctccacgagactcagccaggattctgacatacagaactgtatgagaacacgattgttgttttaaaccactacgtgtcggtaatttgttacggcagaaactcttcttaaatgtgcatttctaggcctcacccgtataaattcggattcaatagtcccgggctgagaatgtgaatttttaacaagcgccccaagttactctgatgaggtgccgagaataacactttaagaaaacatggctgacagtaagcagcagaaatatgaagaaataaccagcactactaactctgcacagacagaaatgcaggttccagagattgatgaggctctgatgatgaaggggcatctgagccaggatgggtctcacatttccagccagagaggaaggaggaggctgagtggctgcacagtggggaagcccgcagaggggagagtctcctctcggatgcactgggtctatggcatggctgaccaggtgccctaatgcaggaggcatcggaaactgtgggctcgaagccaagctataagcggcgcactgaagatacagaggaagagttcgctgcacaaggttgatagtcaagggggaaaagttagatcgggtaattggagttatgaggagagcggaacggggcaaggattccagtactggagaatgtctggtttactgtagccaagatattttagtttagggcataatttaaaatgctcccttgactcctccaccccatggaaggtctcaggttgaggggcccagctagtcctgaatgaggtcctctgtgaccaccagctcctcttctctccttccctctgccatagtgaagctctctattgtgggatttgggcatatgaggggcaggcccacctcccctagatgtcacctctctgccttctgagtatcaagtcagtctctttctccctaagcctcccaaactgtggggacttacgtgtcagtgtcatttcagttgttgtatgattatagatacatgaaaaaggaatatttaaaaattgtcctgacctccctcctcccgacccctgtaggaacccaccacttaaccacacaagggcccaactcatcgagcattacagcttggggaagaaacgccagccgcgagccagagaaacaaaaacgaggggctgtccctaaaatgcaggatccaagggcctggagctggagagaaatcaggcagcacctcacagaatccaggctcacagaaagtctgtttcgatcagaatttaaaacaaccctcttcctgctgcaactcttcaggccactgacaaggtgacaggatcacattttgtacaggatacaaacatattccctatgggtggacaaaacgaccccgtagcccatctacaccaaggagctgcacctgtgccctgtgtagccagatgcaattttctattattggaaaatccactttaagttgttccttagcaaattcttcccaagtactgtttcctttcctcaattcctggcctagcaagtctagaaagaaaacaaaaagaatgtaaaatgttcttggttgactttactcttaattactaaaaagcaaacagagaaaattaaaatcaaacacatgcaaaaaattcttctagagccttgcacacaatgccagttcttgaaatatttcataaagcaaagctaatgaaataaacaaagacgtggctgaaaggatatgcattgtactgtgcttatggagccacattgctcactgcatctctcgctccactgccgccgggctcatctgccagaagcctgttcctgagctgattggggttctggtccaggggtcccaaggagcgaggcccaagctcaggaggacaaagaacgaccacctggaaagtggcaaaaatctgtaaaaaaataaaatctgagtgggcccaaggggcacctggtctcaagagcaaacgctgtgtccagagcctcatgtccggaggcccagcccgactccctggctcttacagccccgaagcccagagaccaccccagcccgactccctggctgagacttcccgcccggatgccgtgagatcgtcccagcccatgctgaggtcagtttgtgctgttatctcttttttttttttttttttttttttttttgaggagtctcactctattgcccaggctggagtacagcggcgctatcttggctcactgcaagctctgcctcccaggttaaagcaattctcctgcctcagactcctgagtagctgggactgactacaggcgcccgccactacgcccggctaattttttgtatttttagtagagacgaggtttcaccatgttaagcaggatggtctcgatctcctgacctcgtgatctgcctgcctcggcctcccaaagtgctgggattacaggcgtgagccattgcgcccagcctcgggcaagcctattaaaaacttcctagtgtgcctcctcatttgcacaaggatgtgtggtaaagggttaactcagcaggcttggggtgtccaaaccctgcacattcagagaaaggtctggccctgtccttcttcccagaggataccctttgagcccttggattatcttgcttgataagagtgtttacgtttacctgcggcctccagccatggccaagagttcatggagttcatgttaacagtgatttatgtggaccctagagccacactacatcaatttgacctctgggatagctggactgggtgactaggattagccagcggaatgattcaggcctatgtgaccggctcccaggagaagccctggaccctaaggctcgggggcttccctggcaggtggtgttatgtgcacactggcacagttgttgccgacagaattaagtgcactggtgtctccttcaggtcaggacggcgggcagctcacagctggcctctcctggactgtgtcccaagcacctttttcctttgcttattttaatctgtgtccttttgctataataaacagtaacgttctgtgaatccttctagtgaatcattgaccctgagggttgttgggggcgtcagacacaaaggggataaggacacctgccttgactgcctcagaggggtcacagggagctgagatccagctgtcacagtgaggccatgcaagtctgggggttcttatgacacagaattctagtgaggcaaacagtactttcagactgaataaaggaggggtgttattcacttccagcgtctgtcatctgccgaaagctacgtgccctctccacggaagatacaggggcaggatctcccatccacagcaggcacacagactcccaaaggccctgtgcacagagctctggattaggaacagattccccccccaccgccccccgccgccggggagagccccacactgccttttcctctcaggatgcctgacaccatttagggtgggatgtgggaagctggcttcaggatcagacctgaagacaagtagctgacctgggggttgagccagggctcacacctaggcccttctccaggggggtttaccaaaaccagccccatgtcctgtagacctgacttttgtcaacacacacatatatcctccccttatgcacaggtgtttatgtaaaagcaatgtatgtttatatgccaaggtgacttaaaaattacaaagtgcggtacaaacatgttatttacgttgtgatgaggatgacaaggtttggatttcatgctgtgtgtaatgatgtcagttggagttcttcttgggataaaggagggcaggcggtcagcacagttcctgttctgtgaatcaaggaccttcgttcaagcagtccttactggacacctgtgtcctcatccttgctaatacgccaaccagccacacacactgcaccacagagtccctatgtcataccagccctgcaggcacctgtttcttggcaccaagtgtctttcatgagtgtgaacccatctgatgttagtggccagtggggaaaatgcccatgggaagtggagtgtcgggggagcccgagcctgtggcctggccattctgcacagtgagttgcggccagtacgttatgtgctgatgcaattcatagctgctcagcacgactctgcccagattccgtttattatcctactaaataattattttcattgtcttcatctttttaattgcactactgatgtctttatcttaaaatctgaagaaggctctctccatggggcagactttgtcatttacaagctaactggtgagaaattgaaggggaaagtgcgatcacgttaagtgcctttggaagaccacaatcgggatgcacaatcactcaattataacttggtgggaagggaagcagggaggtttgaggaggtgagaggcgagactctggttcagaaacctgtgctcaggcctgagtccctctcattggccgggggtcttgcagaagacacggcctctctctgagctcagttcctgtatctgcagggaccatgacccatcagccagttggtatgaagagtaaatgggggaacccatgggacagcgtgcaggaaactccagaacgctgcatatttctctgcattttgtgtgtatgacaagccatgtgggggttgttatttccatcaagcactagatgaaatccattctgctcgattctatctagttgttgccttcctagaaacacaggaataacctgcagcaccacccccttctgttctgtggcattggcacaatcaaggaatctacttttgtgcttttacacattgaactgacaggtaaggtcaggcatcgactgtcacaggggccagtggagaggtaggagggacgcccacattcgatgaatcctgcatcacggtgttggacttcttgttccacggtgttggacactaaacttgttcacattcaataacttgagcacgaataaaggcagctcatagtaataacacctgatgggtacaggccctgtgctctgctctaaacactgctcctgttacccctacaagacatgggccctgcatttcacaaacatgaattctgaagaccatgaataactgttctggcccagctctattgggccctaactctgtgcccggggtcgggatgcgggttgtatttggagcccgttgcagatgcggattcgtctgctccacgcagggtgctctgacgtactctgtgtggcctggagctcagaaacctgtgctggactcagtgcctgcagacgctgcccctgggtagctgttttccaggcgtcaggagacatgctccagaggctccagaagcacagacggatcatgaggtcaggagatcaagaccatcctagctaacatagtgaaaccctgtctctactaaaaatacaaaaaaattagccgggcctggtggcaggtgcctgtagtcccagctactcgggaggctgaggcaggtgaacggcgtgaacccgggaggcggagcttgcagtgagccgagatcgcgccactgcactccagcctgggcaacagagtgagactccgtctcaaaaagaaaaaaaagaaaaagaaagtgatggagaaaatgttcactatggagtctcacatgtgggtggtgtccggtgctgaaactgaaagaggtttcagttttgtatgtaatatatacaagggtgaaaatagtttacatcacaaatcagattaaggaaaataaatgtatagggaaaagagttagcaggttgctatataattagattagtcaaatcgtgtttcaacaaaaatcagcaaaaacattctgtgagcatcaattggttatgtggagttcatgatagagagtgcagcatatcttattacttgtaagctgtatgctacatatccttgatatcagcaaaatttataacaaacttacatctgtatttatatgcacatgtattttgggaaagctattgttaaacatttaagagtgtaccactatcatggccaggcacggtggctcacgcctgtaatcccagcactttgggaggctgaggtgggtggatcatgaggtcaggagttcaagaccagcctggccaagatggtgaaaccccatctctactaaaaatacaaaaattagccaggtatggtggggggtgcttgtaatcccagttacttgagaggctgaggcagagaattgcttgaacccgggaggcagagattgcagtgagccgagatcgcaccactgcactccagcctggggggtgacagattgagactctgtctcaaaaaaaaaaaaaaaaaaaaaaaattaaaagagcgtaccactatctacataaatacatacactgaaaatgcataataacttcagctgctctgataccaaatgccaacatccatgaaaatgtcctacaagagagggagggagctgcatcaattgcgctgatgaccctgggccaattgtcctaagatctgttaggtctgtgatctgggagggccctggagatcctgaggcagcaggtgaggcctgaggcctgggaccccaaacccagctaaaactaaaaactaaaaactcttaagtgtagagttcagtgatactcacattcttgtgcaaccatcagcaccatccatctccagaatgtttttatcttctcaaacttaaactctatacccattaaacagtaactctccatccttccctgctgtccccagcccctaacaaccatcattctgctttgtctctggatctgactactctaggaacctcgtataagtggaatcttacagtatttgtcatttggtatctggcttatttcactcagtgtaatgtcatcaaggttcatccctgttggagcatgtgtcaggattcccttccgttgtaaggctgaataatattccattgtacggatacaccacctcttgttgactcattcatcctcttgttgactcattcatctgtggatgggcacttgggttgcctccacgtttgagttattgtgaatcatgctgccgtggacgtggctgtactgcaactggttttgcatttatttgaataggtggatttcaaaggtacaaaagaccatcctgtgaaccgtgactccctcccagcccatcctccaggccccctagagttttaaccacaagcagccatggtcaccagtttcttgtgatctttctaagagtatgtgagcatatgtgctatgccatggtagaggctggacgcggtggctcacgcctgtaatcccaacactttgggaggctgaggcaggcagatcacctgaggttgggagtgagaccagcctggccaatacggtgaaaccctgccttcactaaaaatactaaaattagtcgggcacagtggtgcgtgcctgcaatcccagctactcaggaggctgaggcaggagaacagcttgaacccgggaggtggaggttgcagtgagccaagatcatgccactgcactccagcctgggtaacagagtgagaccctgtctcaaaataaacaaacaaataaatacaataaaattaaaaatctaacaacagtgccctcgttcccatgatctcacagtccatccagggagacagacttgtaaccgaatgccatgattacaaccagctcaatgggagatgaagaaggaggtgtgttcggaaacctgggaactgaggagggagtgggctctcaaccttaacatgggctgcgggagttgggcaagaatcagaaacagattatgtagatgatactggaactgtgtggtttcccatttgcaaaaaaaaattaaaattatattttacaatgttagtatattctgagcattttaagaagtaaagtccactttgataaaaggaagaatgtctatcttccttgtatatatatctattcctatagaatacccatttgtgtcttagtttgtaagagctgccataacgaaataccatggactgggtggcttaaacaacagacattgattttcttacagttctggaggccggaggtccaatatcacagcattggcagggctggttcttcccaaggccccactacttgtgttgcagatggcggccttctccctgtccctttcctctgtgtacatagatccctggtgtctcttcttcttcttttttttttcttttttttttttttgttgagatggagtctcgctgtgtcacccaggagagcaatggcatgatctcggcttaccacaacctctgcttcctgggttcaagcaattctcctgcctcagcctcccgagtagctgagattacaggcacacaccaccatgcacagctaacttttatattttcagtagagaccatgcaccatgttggccaggctggtctcgaactcctggcctcaggtgatccactcgccttggcctcccaaagtgctgggattacagtctcctcaccttgggcaatttaatccctctggactttggtttcctaactcgtgagatgacaatagtagtttctttctaatttggctgtttttaggtataaacgaaaagaatatataggtaaagtgcttagtacaaccgtctgggaaatagcaaagtccccataatgccagctgccgttactgttatgtctagtatcgaacttctcctggaaatcagccacctctctccttgagccctgtccagggccagtgggtttttggtagtgtagaggggcaactcctatcttgcaaggaacggcaagaggtcggggcaagcagctctctctggtcacttcttcaagggggtggttgctgaggctttggaagggaatttagtgagctcagaccctctcaaggctactgtgctccaagtatgtggcagttcatttcaagcttgatggcacactctttgcagagcagttgccaaggaacgaggtaatcttgtgacagaaatactgcctgatgctgtcagtttgatggtcgaaaaggttttaggtggtatcaaattttattactagcattcctggtctccatgaaagaaccacataagaagacaagttatgtcaaaggacaaaaccacagacctagatgggcaccgtgcatacagcagacacttggtttccttttgatattgactcaaacagggactggattaaaaaaagaagaaaataacaacaagaccacagacttaagctgatcagtggtctaacactggcaagattacttttgttgataaattgatttcttgggaaatcctgggaaagttcctggacgtgaccctgtggtcctaccaccactagctacctgtgaccttgggtgagtcagcaagtggatgcaaagggaacacacacagcacggtgccacagcgggcaccacctgccccccgccgtcacagatggcttgcaaataagctactcacgtacttcctgagatctgctgcacccaaacacaccaagctcagagaggcttttgaggcagacaagggcagggagagaggatggttcttctcgcatgggtatttaaggagtgtagtgtcatgcgtgagtgactttttggttagtaagttctgctgattacatgaagcaatgggataactatcacggccaaaagagtattcctactgcaggctcagtaagactttctaatgatattgaagtagtagttccctgaaaagagctactatgatcacatggcttggttaactgtttcttacaagtctgagcatgaatttaacacacacgaactatacactgacaaagacaggatgctcctgaaataaaatcacagcatcttattgcatatactacatcatccaaggtcaaaaccctttcatagagacatttaaaactataaccaagtaaaagagaaaatagatgcaaatttgcttttacaaaatttgaaaatcaaccaaaagagtaaggcacaagatgcagtcagctacaaagcacttcagagaacagcgctttgctctcaggtctgggacccaccccctgggcaaggccgcctggcagcaggcaggaaccaaacccctgccacctccactcactcccagggttcctctttgcaggatggtggggagcgcaggcaccaaggcaggaaggccagggcaggaagatgccccgcgtccttcactttccctcagtgtgagcacaccaagttccctctaaccaggagaacaggaccctaggcaccaaaagtcaagcatgagggactgccacaggcagtctggcaggtgtctttcagatgctaaagtgccagggtttgcaggatacttggatggtttacagtgatgatgagttggagtctttaaactcaatggtgtcctagatactcagttaggatgatagtgatcccatccatcccgtggttggtcactgagctgcgtacgaagctggcctagaatcagaccccgcatccatagggagaaatcatcaccctctaccgggatctggatttgttttcaggatctattctcatgaaggagacttgagaagctgagaaactccagaagaatttaagtttcaaagtcagatgagtttgctactcaaccttcatcatggttgtagctttcgctcccagaatacaaggccagagaggcaccaaccaggaggcaaacttcaccttcaaggccaggcaacgcctggctacagttagaccccgcagcagggttaaagaaggctacagttagaccccgcagcagggttaaagaaggctacagttagaccccgcagcagggttagagaagtctctccagcaaggctgggagttcagcttccaatagatctagagggccaggagaaaaagcatgctgagtgcctggcggcatctagtggtcactagtggtcactgccagtcatcagctttcctccaataaaccagttatcatgagaatataaaacaatcaggaagaaaaaaaagtgtagctttttttttttttttttttttttttgagacaagagtttcgctctgttgcccaggatagagtgcagtggcagtgatcttggctcactgtaagctccacctcccgggttcacgccattctcctgcctcagcctcccgagtagctgggactacaggcgcctgccaccatgcccggctaattttttgtatttttagtagagacggggtttcaccgtgttagcctggatggtcttgatctcctgacctcgtgatctgcctgcctcggcctcccaaagtgctgggattacaggcgtgagccaccgcgcccggccaaaagtttagtattttatcaaagaaaaccatgacatactaaatagtcctgaaacaaaaacgatttacacattttcttctgactaggtatttattaagttctaaaaccttgaataactgctattttaaaaattcacactaaaagaaaactagaaatgttaacatcttttacagagggcagtaagtggccttttttttttttttaaattataattgcctaggagaaaggtgagctaatctctttggaagtgtcatcagctggtgaacttcatcttggtctccactttatgtctttcactccatgaaaatgtcttttcaaagcagtgttatccgcccatggtgagtttaaataggcatcatcatcattttcttccaatctctggaaataagtatgttttattcaggcaggcatttcaggaaagtgttttgcacataaagagactgaagaaagagtccatgactgacctccccctctccctgccctctaggagcaggatactgccatgtctaacaccaggggacacctggcaggaccccgacagacctgcagacagaagctctagaaagacccctccccggcattctgcagagctcactgctccccagcagccccaggtaaggcacacaggctatgtgtgggcgccagcactgcagaaagcccatctgtcccctgctaccttgagctcctcttgtcttctgtgatagtacagcatcagctgcttctgctcctcactgctaataataggctctcgggctggagctccctgtcccctctgcaaagaggagagcagagcaaattgtggattaaggtgttcttagagtgacaatcctgaagttacaacaaatgttttacgattgcctttgccggctactaaagataaacaggtcccccatgtctgatcacccgaagtgaagcatcaagggaagccttggtcttgagcagccctgagccctggactctcactgtgtggagaccagaggctgcacgataccatctctgtcttgaccattcccaaggcagacactgcaggcaggtccagtgggaaagggaggatgctcagagccacggactctggatctacataaggtggagggccccatttccccaaaatcacagcctagtgacgtaggagcacccacaaaaccaaggcggcccctcaggttacagcgctacacgatgtccttcaaaggtctcgaacctttcctcctccccctcctgtacacagcatcagcagtttgaaaaagcctgaaatcagtgacgggcgaaattttacatttcaaggaacatatctgtttacttgcagccctatttttacgcttgaaattaacatagtatatttcctctcccccacatattaaaacaaactctagatattggtactcaatccatattttcttccagtttttgttggtgtgcaggaagaggatatttttagtttaaacccgagccaataagattaaaatatttgtaccagtagtttaaatctttcggattcactgtacatttttatcagtttgaagggaaataacaaaaactactgacacattaaagcaaaaagtacttacttgctgaatcttggcgataattttggttttttcattcttccccacgtagtctgaaagcttcttcgttcttctcagctccttggctgcccaccacagctgcgcctctgcctctttaatgacgttgagccctgcctggggccagtcgtaagaatggcttgactgtgtgttcccacccagggggcagagcccagctgagcccctcccagcagggggcaggggacagatttctccccgtgctcaccatgggaggcctgactcccgcacctcactctaagtccttgctgactttagtaccttccctgttaagtttccactcatgccctgactcagttaacttcctcctctggacaacagggagatcctatctcatttgcaccttgatccatatagttcgtcttagacagatctgtaggccactgccagggaagggcactggcatcgtgctgggtgtttaaatcgaggtataaaggggctgcctgtttacttctgcatatttcatttatttaacatggcttagacaaagaatattgtccaataggataagaagtgagaaaacccaaggaaaatggaacatgagggtcagaaaataacatgaagcaacaggtaagactagaaacacaaatttccatgcaaagggactgacgcatttgggtagaaataggaagaaattaggtagctggcttcctagcagccaaagacagtggaaatgtttgcagtcactcctgatgagcggcctcacaaactgcgtccactgcctcctgtgtgtggggccaaacccctcactcatgagtacccactctcaggggctgctcctgaattcagaactctgctctgaagcagggcatagcaaacctgaaagctgtgtagggagcaaaacactacatccagaagaggggcatcaaatcttaagggctttgggggccaggaactcaacctccagagtacccactcacaaactacgtacctgtgttcccgacaagtcttccttattttcaaactccatgcggatgggatcatacggtggcaaccccatggggtaaacaatcatcaccgcgcctcgaagctggtccaaggcatctttcaccatctccatggtaacacagacaccggcttccacttgtttctgcaagcagaaagccatcgttatctacagtgtggctaatcacttccataaattcgatcaagatcttgtacaagacccttgccagatactgccagagcaacaaaaagaaatcaaacagttcttgctcccagagtgactaccatctatttcaggggctgagcgaagcacaccgtggcctgtattataaagcagacggtgagcagcactgagcatggagtacaatgaagtgcaaagaattctcaaaggagaaagagcccaatgctggcagcacagatggcagtgaggatcgggagatacggcagggggagcaggcaccgcaggtgggcctcgaaatgcagatgggctgaaaaggtacagatggcagcaggtgcttcaggacaagctgaaacaaagaaaagcaggcgccagccccctcagcatggggcaggaaggagagaagatgaggccagctctagctggatcagctgaagtttgtttttgaatggccacaaaagccaggctgaagagttcacctttcctctgttaggccacgggaagcgactgccttttctgggaaggagtggtaatgttgagagatttatcttgtagctgatatagaacagacctagttggccagatgtggtggctcacaccttatgtaatcccagcactttgggaggccgaggtgggcaaatcacctgaggtcagcagttcgagaccagcctggccaacatggcaaagccctgtctctactaaaaatacaaaaattagctgggcgtggtggcaggtgcctgtagtcccagctactcagcaggctgaggcaggacaattgcttgagcctgggaggcagaggttggagtaagccaaaatcgtgccactgcactccagcttgggcaacagaataagactctgcctcaaaaaaaagaacagacctagttggagggagaccaggtagcaggctctgaagagtacagaggaaggtgtgatgaaataacaaatatatctggtctttgctactcagttccaggcacagagctccaaaactcttggaatttcctgagtgacaggagtgtcttgttatttataacgagccccttctcaccatacctgagcttgtgctaatacagtaacctgtagtccgcgctgggtttcaaggaaggggctggccgtgcctgggagaccaagcacataattagagggttggagctttcggcctcactcccttcctccacctccaggcgctagaggttgggatcaaacacgtggccagtggtttaagccatcatgcctactgaacaaaaacgctataaaaatcccagacatcatggctcagtgaagcttcctgattggtgaagacgttgatgtgccgggtgacacacatcagtgggggcgttgtgggaagctccaaatttgtagtcaagctggacacaagtatgggtggcctggggacctcacgtgcagctggtgtctgaaataagaggagtcttgttggtgatctcaccctttaacttttaggtctgatgctaactccaggcagttagtgtcagaattgaaggatctgcccttgacctgtggggtctgtgctgtctctgagtagttagtgtcagaacggaattgaattgactggcaggacccccagtgggcatcagaatgcaaaaggctacaggagagccttaaagaaagccacagctgtggaagtgaaaggaagaggtggacttaagaggcatcatgggagcagacggtacagaaccccacttcaaacctagaggtgacagaagggagaagtgttgaagatgacactgaggatttgccctataaaaccaagacactgtggttctgttactggaaacagagaagctcataggaggtgctgattctcagggacagaacagagagggagaggagtgaggaagcaaagagctcatttctagaaaactggacttcaaagtgctgactgggtgttcagatagaaccatctcacaaccagctggaaattcaggttggaagtgaagcaagatgtcagggggaaaggatggaagcttcagagttatctgcagagggtggaatttgcatttggcagagtagataagatactgagagaggaagaagaccaaggataaaaagtactttcagaagtacacaggcaaaggggagaagtgaggcgaccgagagaggagttccacagcaaagtgtggggagaagggtgcagaacaacagccagaccactgttttcttgccatggcctgagacgtgctcacatgcctagatgccatcaccacgcaaacgacgggctcaaccagggcctctcctgtagagcttcataaagcctttcctatattaacaggcacagagcttcagggcagcctttgctgaggctcttcaaagattagtcaaaagcttggtaagtttgagaaatattggtttaaaaataacagttctgctgagcaaaccaggagaagcagaagaaaaagtggtgatcagtcaagagacttgcagttgagagcggtagcaactaatatcaccaacacacaaatacaagcaacagatacagataccacttctttcaatagccttaaattctcttcctccagatacacattatctgtatatcaatggtataaatttacgctcctccctctataaactagcctttgtataaaatgctgaagacaattacaaaaaaccatttatatcaaatacatattaagtcaatcaagtgtctggagagctactcgatggccacaatattcaaatctcccctacttaactttgttaagttcttcaaaaaggtaaaagaaatgaaatcaacatttgtattatacatatttgtattatacgtgaacctatatttacataagccaacaaaaatttgtgtctgcctggaggaacggagaggcctctgggcaaccgtcaggattatgaaaggaaaagctacagcctaccccaaatacgcttgtttcctttgcctccggaaggctgaaagagaaggctggctgagaggcaactctggaagccagagttggagttttatctcaaaagacaagttttaggccgggcgcggtggctcatgcctgtaatcccagcactttgggaggccaagacaggcggatcacctgaggtcaggagttcgagaccagcctgaccaacatggagaaaccccgtctctactaaaaatacaaaattagctcggcatggtggtgcatgcctgtaatcccagctactcgggaggctgaggcaggagaattgcttgaacccaggaggtggaggttgtggtgagccgagatcgcaccattgcactccagcctgggcaacaaaagcaaaattccatctccaaaaaaaaaaaaaaaaacccaacaagttttagtgcatcatttaaaaaagccaaccttagatattattgctttggcttcttctatagtcttctttaacacttgcttcatcttctcatttggagctataaaaataaaaaggagagagggagaaagagctgtcaaatacaaagcctcttctgaaatacctcaatcccctctgtctgagtcagggggtaaatgaactgagagagagtgcgagtgtggaatttagggaagagaagcaagaaacctggctgccggaagttaggtgaagacctcttcccaacagcagagacctggagtgtgctttacgcaaagtggcaaaggctacaaaaaacagaaatgcatgtcgttgggtaaacagggccggtgaactttttctggaaagggccagagagtaaaatttgaggctttgcaggccacacagtcttgttgggtgggataactcagctctgccacgtagcacaagagcagacaatacttaaataactggggtagctgcgtctccttacaattttatttacaataggcagctggctaaatttgacctgtagcccataatttggtgacccctagatcaggaaaaaataataacttgaaagcttagaagccaaaaaaaaaaaaaaaaaaaagaagaagatggaatgcccaaacctagggaaaatggggcaagttgaaaccatacattcctagtaaataacagtattaattagacattgaaaatattagaaacacaagattgtattataatagaagtggttaggctgggcgtagtggctcacgcctgtaatcccagcacttcggaaggccaagatgggtggatcacctgaggtcaggagttcgagaccagcctgggcaacatgctgaaaccctgtctctatgaaaaatacaaaaattagccgggcatggtagcaggcatgtgtaatcccagctactctggaggctgaggcaggagaatcactggaatccgggaggcagaggttgcagtgagccgagattgtgccactgcactccaacctgggtgacagagtaagactctgtctcaaaaaaaaaaaaaaaaaaaaaaaaggtggttaatttaagaacatattacatattggtttaatgatgaataatgaactgttaactggttctcatattttttttcctcatcttaccacatcttcttacgtaagaaagctgtggaagacaaccatttttcaggttaacattgaaaggaaaaaatactaggaattcttactatccctgatatttaaaaaaatgtatttttgagctgctaaaggccttgcaggaatactgttcttttactcctaacagtgttttagggctgttcaattacagtgttttaaatggcgcttttaatgcaggttaaaaagaataagctatcaaaaaggattatcatcaattccacatgatcagccaaacactgaaaggagaggaatttcctcagtgttttgccgtgtactgaagtgctctgccccagagagaagcatgtccttgatcagggaagtccatgtgctgacatgctttccctttcctctttcacacagtccatctcgaaagatcccccaacatttgcgaacagtaacaaaacacaactctgaatacattgcggtgaggacctgccaacaattattaggtggaaacacatgaaattgccaatactcaaccatttttgagctacagaagggaaagggtcatttcatctggttcgtcgaatacatataaaagcaagctgcaacttattaaagagcaagacaaaagcttcctttatctacctaattcatcctagattagagttttaccaaaggagctacagagtacagtattttgtaagtctgtagagaaatgacgaggtcaatttttaaacgtaaagaactgctttctcacacctgtaatcccagcactttgggaggccgagaccggcagatcatctgaggtcacgagttcgagaccagcctggccaacatggcaaaaccccgtctctactaaaaatacaaaaattagtcaggtgtggtggcacatgcctgtagtcccagctactcaagaggcggaggcaggagaatcgcttgaacctggaagacagaggtggcagtgagctgagattgtgccactgcactccagcctgggctagagcaagaatccgtctcaaaaaaaaaaaaaggaactgttttcatacttatgcctgtatcaagcatgcacatagaagagaaatcctcacttaccttgcccattccttcgtccaatatcatcctttttaaacactgcacctccgctgggtacgcatttttcaccccattcatccttcaatttcaattcttcaatctgatcatcggtcagtccttgcatattaggagggagaaatatgccatgttcggctaattcttccatttcttaaaaataagtgaaagacagtatcacaatcataacacctcataccccattggaatgtaagctccaaagagtcaggggtcttgcccatctggctcactattttatggaacaaacatttatatgccacttgctatgtgccagacctggcctgggcctttgacacgggggcatggtactggtcttattcatccttgtcttttttttctttgagacagggtctccctctgtcacccaggcaggagtgcagtggcgcgatctcagctcactgcagcgatctcagctcactgcagcattgcctcccgggttcaagcgattctcacgcctcagcctcccgagtagctgggacaacaggcatgtgtcaccacgttttgtatttttagtagagactgggtttcaccatgttgcccaggctagtctagaactcctaggctcaagtgatccgcccgcctcagcctctcaaagtgtcaggattacccgtgtgagccaccacgcccggccccatccttgtcttctgaaggctgagcactggtgcagaataaatacatgaattttcagttcactaatgtgactcttagcattcagcacatttccaatttataacgttataggaaaagaagatgaattccttttctcctcaaatgctttaacttaaaaataacatttaatattgagtttgtgttggaacctcaattaagaaactacacataagtttcatgaaaagaaccatgaccctcaggaatttctccacggtgcaaaactcacatattcatataatgtaatcaatacatttcataataaatcacatattcatgcaatttaataaatcacataaatgaatatactatttattgcaaatagttacgtttgtatattctatatatacacgatagttatataaacagtaatatcctagaccacatcaggaagtatcatcccgtcaagttcaaaaactatgctgtctaatgcggcagctactcgctccacttggcgatttaaatttatttaaattaaaatgacccagacgcgatggatcacacttgtaatcctagcactttgggaggcggaggcaggcggatcacctgaggtcaggcgttcgagaccagcctggccaacatgatgaaaccccgtgtccactaaagatacaaatattagctgggcgtggtggtgggcgcctgtaatctcagatacttgggaggctgaggcaggagaatagcttgaacccgggaggcgaaggttgcagtgagcagagatcgcgccactgcactccagcctgggcaacagtaagaccctgtctctcacacacacacataccatatatatatatatatatataatttatttatatttatatatacatatatataatttatttatattcatatatactatatatatggtatttatttatatttatatatatttaattaattaaaatgcaaatgtaaaattcggttgcctggccgcactagccacattccaaatgctctacggccacaagtggccggcagctgcccaatggacagcacagatgggggcccttccaccgccggaaagttctgcggcaaagcgggtgccctggaacctgcgcggggtagggagacggcgccgcaacgcaacaggccgtttccagggcggggaaagatcaccaaggcttcctcaactgtaaggggccgtcccaaagccaggtggctcgctgctttacattgggcgactaaaaatagtaaattcagcttttaaaagcccacctagttctcatctcacccctcacacgtgattaattgcactaagtctgctgttcagcccggcctttcggctccctcctccctccccagcccatttccacttattcgcagcaccccaaatcctggctccgagaggcacctgggcccacctcccagcccggggtgtcagacaggccggatcttctccggttccttattcatctccggttaaccctagtgtcccgtttcaaccccggctgctgcaaatctcttcaataatcttcacaaacctgacccctcggcccaccctgcccctctttctccatcccacgccggtctctcgatctgtccgggatgggcccacccgcgagccgcacctgagcagaggcgctgcaccttgagccgcccattatagacccgggccacctgcaccgtgagctcctccagctcggtactcccaggcgcctgcagcaggaactggctctcgtcgccccgcttcacgtgcagcagaaccatggcggtcccgccgaggtactgaggcgttgagaaggccccggctgcgtggcccgcgggtcctgccggccgagggtcgccggatcgccagcagctgcgacgcactaacagccgctcacagtccggaatcccacgctccctagcccgcggtgagcgggggaaacggcactcgctcccggaagtggatgttgccaagagcaacagtgaagcagagttaaagagccgccagctcaagctcagaacccgagtgggggaggctggggtgcaccgaggcccagcaatccaagcccgtacggagctgcggccggggaaaccacccacacagtctgagaggacagctgattctgagcggaccgacggaaggagattcgcagagccccttcccggaagtgactgttgtcgcggcaactgccaaaacacagaccaagtcgctgaaggggagggcggacctcccaatcgactggtctggggcccgagatttccactcagggagatacgtgggctgagatgggagttactagatggggaacgggaaatacggcgggaaccacaatcgcgcagttccgcagctgccgccccacaaccgctccacattccagcgtcccttccgccgctttcagtctccacttccggcaacgtttccacgctgtttccggcctgggaaagttcggcggcagcgacccagaactgagtcttgctgttcgctgctgtttgcgcgggtcagcttttcaggacggaggggccagggcgagtgtccgcacttcttcgttcaggttgatttggatggcgttgctggggtagctccagcggcccctgccagagcgaccctcccagaaatatccagccatcctccagcggactcttgctgaaggcagtcggcgtcagtcgctgtttattccgggccccacagatccagagtcactgctctcatggagcttatattttagtgtgacaaaaagaaaacaaaaataaatggacaggccaggagcggtggctcacgcgtgtaatcccaacacttagggaggccgaggagggcggatcacctgaggtcaggagttcgaaagcagcctggccaacatggtgaaaccccttctctactaaaaatacaaaaattagccgaacgtagtggcgcgtgccagtaattccagctactagggagcctgaggtgggagaattgcttgaacccgggaggcggaggttgcagtgagcctagatcgcgccactaccctccagccttggcgacagagtgagactgtgtctcaaaaataataaataaacaaacggacaacacaaattcaaatacagatctaaagaaaactaaacaggttgatggacttcttatgtttgatggtcagggaatgtacaccttctgcgatattgggagtaatattatcgtctcccgccctgaatatttagaaaaatatcacagtggggtgtacacccctgcgatattgagagtaatgtcatcctctccacccaggaaattactaacaaggtcacggaggggtgtactccccctgtgatattgggagtaatgttttcctccccaaacctggatgttagcaacaagataacagagggggtgtacacaccctgcgatattggaagtaatatgatcctctcccccccggatactgggaaaaatatcacagcgcgggtatacatttccttcgctgttgggagtaatatcattcttttcctctctggatatcaggaacaatatcacaggggtggtgtacatttccttcgatatggggagtaatatcatcctctccccgttgggatactaggaacaatatcccaggggggtgtccaccctctgcgatattgggagtaatatcatcctctgtttccccggatattagacacaatatcacaaaaaagtgtacaccccctgcgatattgggagtaatatcatactctccttccctggatattagaaaacaatatcatcaggggtgagcaccccctgcgataatggaagtaatattttctctttttttcttttcttttttttttttttttttttttaacagagtttcactcttgctgcccaggctggagtgtaatggcatgatctcggctcactgcagcctctgcctcccgtattcaagcgattctcctgtttcagccttccaagtagctgggattacaggcatgcgctaccatgcccggcaattttttttttttttttttttttttgtatttttagtagagacagtgtttctccatattggtcaggctggtcttgaactcccgacctcaggtgatccgcctgattcagcctcccaaagtgctgagattacaggcgtgagcgatcgcgcccagccaccacttagcattttcattttacatttgttgaagttacagatttatacacacattgattgctgctttattatacacttgcatatacataaaatgggaaatagaaaagaataaaatgggcacaatatccctaaagtttcacattccgaaacattttttaaatatttgctttttagaaatttgtttcaattaagaaactgcggtatacacacacaatgaagtattattcagcctaaaaaggaataaaatcctctccgctgcagaaaaaatggatgagattgcaggtctgtatgttaagtgaaataagccaggcacagaatgacaaatattacatgtcctcacttatacgtaggaacaaaaaagaaaatcttggccaggtggctcaggcctgtaatcccagcactttgggaggccgagttgcacggattacttgaggccaggagtttgagagctgcctggctaacatggtgaaaccccgtctctactaaaaacacaaacaattagccaggcgtggtgatgcgtgcctgtagtctcagctactcggaaggctgaggcccaagaagcgcttgaactcgggaggtggaggttgcagtgagcctggactgtgcctgtatgctccaatctgggcaatggaaagagactccatcacacacctacaaacaaaaggaatctcaggaaggtggagagtataaagggggttagcagacgctaggaagaaaaggggtggatggggaatgaggagaagtggataattgggtcccaaaatacagaaagatggagtaagtgagttctagtgtttgatagtacagtatgaaaattttagttcacaagaatttcttgcatatttccagatgctttggtaagaagcttcctaactttctcattatgctggtttttaagctcttgtcttctgctcttgaaatcatgctggttttttgttttttgttttgagatggagttttgctcttcttgcccagactggagtgtaacagtgcaatcttggctcaccacaacctctgcctcctgggttcaagtgattctcctgcctccacctcctgagtagctgggattacaggcatgcgccagcatgcccagctaatgttgtatttttagtagagacgggggtttctccctgtcggtcaggctggtcttgatctcctgacttcaggtgatccgcccgccttggcctcccaaagtgctgggattacaggcgtgagcgaccacgcccggcccatgctgtatccttatctgttgtttgttgtggtttgtttgtttttgagcccagaaataacttctcacctatgtgttcaaatgatttttaacatgagtgctaagaaagctcattggtggaaaagcagccttttcaagaaatggtgttggagaaacttgatttccacatgcagaagaatgaaggtggaccctatgtcacaccaggtgcaaaaattaacacaaactggatcaaagacctaaccccaagtgctaaaagtataatatgcctcaaagaaaacattggccacactttcatgacatcagattgggcaatgctttctgggatatgacaccaaaagcataggcaacgaaagaaaattagattccttggattacatctaaatgacagacacttttgtgcatcaaaaaacactgtgaactgagtgaaaagataacccatggattcggaaaaatatttgcaaatcatatatctgaaaagaggctgatatccatcatgtataaagaacagctagaactaagcaacaagaaacccaaagcatcccattgacaatggtcagaagactcgagtagacgtgtccctaaagaagatacagcaatggccaataagcatctaagatgatgttcaaaatcactcatcatagggaagcgcaaatcaaaccaataatgtgataccacacattaggatggatatgataaacaagcattggtgagactagagggaagtaggaatgctcgaatatgattgcagggaatgtaaaaccgtgaagcaacagtgaaaatagtatggcgtgtactggaaaaattagaaacagaattatcagatgttcctgcagttgcatttgtgggtacctaccaaaaagaattagaagccaggagtggaagagatatttgtacacccatattcatagcagcattattcacaacagccaaaatgtggaagcaacccgagggttcgtggacagatgaatgaaaaagcacactgcagttcattcatacagtggaagactattcagccttcaaaaggcaggcacttctggctggtgcagtggctccgcctgtaatcccggcattttggaagaccgaggtgggcggatcacctgaggtcaggaattcaagaccagcctggccatcttggtgaaaccctgtctctactgaaaatgcaaaaaattagatgagcatggtggcgtgtgcctatattcccagctacttgggaggctgaggcacaagaatcgcttgaacccaggaggcagaggttgcagcgagcccagattgtgccactgcactccagcctgtgcgacagagtgagactccatgtaaacacaaaacaaaacaaaataaaacaaaacaaaacaaaacaaacaaaaaaaccagacaggcacttctgacacaggctgcaacgtggatgaaccttgaagacattatcgtcagtgaaataaataaatcccagaaggataaacatgaccaggctcagtggcttgcacctgtaaccccagcaatttgggaggctgaggcaggcggatcacttaaggtcaggagttcgagaccagcctggccaatacggtgaaagctcgtctctattaaaaatacaaaaattagctgggcgtggtggcacacgcctgtaatcccagctatttgggagactgagacacaagaatcgcttgaacccatgatgtggaggttgcagtgagccgagatcacaccactgcactcctgcctgggcgacagagaaagactcggtctgcaaaaaaaaaaaaaaaaaaaaaaaaagaaatgcggtatgattccacttctatcaagtgtctagagtagttaaactcatagagttgtgaactagaatggtggcccccaggggtgggcgagagagaggaatggagagtttggtgaatgggtgcaatttccattttgaaagataaaactgttctggagatgatggcggtgatggttgctaaacaatgtgaatgtacttaatgtcattaaactgtaaactgaaaaacagtggaaattgtaaatgtttatactggccattctataggaaataatatatatttataatttttaatatttatatgtggtatattttcccataatcaaagatgaaaatgaaagcagttggatctttaaaaaggaaagaagcgaataatacgtaccagctttctcctgattagaggaagagccccaaagcttctatggacactcacttttctcttcttcttgcattattatgaggaaatccttagaggttggggaacttgggtgactttggctaatgaggagctctgtgccttgaggcccccaggccacagaatagtaaatactcagtctgtgcctccagccctgcagtgtgaggttccagtcctgtgggctccacacccgtcacctgtatcaggaggctcatgtctcaccctgtcttcttgccagccttgaggacggagtctgagcctccatcatgcaccacgcagggaggacagtggacctgttctccgtggtcacggcctagcagaggggaagggcagttcagtgagtgctgagggaccgctgggaggcttgttttgtttcctcatcctcaagacaaacaagagagtgcggtgggcagatgggaggagaccaatgtgcaaactgtccactcagcagactgtggagtttctgttcttggttgtggtggggggtctcagaaatcttattcaaaattttgctttcctcccccactggttgtccttttcatagacatctcatccatgatagcagggaatgagtctctctaaactattccctaagaacaacaaaaagattatgaaggtgatgatgaggataaagaggatgatgacagacaccatggcaccatgaacccttactgagggcttcctaaaggccagactctgagctctgtgctctatgcagcttgtttcatttcatctgcgtagtctcccagttattagtgcacatttcattattattttacagactagaaaaggagcaacgcattttcatataacttgtaccagatcatgaagtcaaaaagggtgaagtccaatttgaaccaggcagtctaagtccagacacatggcatttggccagtcctctccctgcatccaacctgccctctcaaatccttgtcactcaggccgatgcccctgctcactgtgcccttccctttgggggttccttgtagaccacagctagaccagtgggtgccacaatcactgtgtcaagtatagaaagggcagctgagatcacatcaaggattccagaaagaattagtacaggatcattcgggatgcatctctcccttgcccctgttcctggctttccttacagctctcgacttcctcaaaggagtcatcagttcggagattggcttccattcctattgaggaagctggaaaccgtttcaaaaatgctcctcagatgtgcctgtggttaagacctctgagctctgcttaaaactttttgaagctgggtgtggtggctcacacctgtaatcccagccctttgggaggctgaggcaggcgaatcacaaggtcaggagtttgaaaccagcctggccaacatggtgaaaccccatctctactaaaaatagaaaaaaattagccaggcgtagtggcgtgtgcctgtaatctcagctacttggcaggctgaggcaggagaatagcttgaacctgggatgcggaggttgcagtgagccaacgtcactccactgcactccagcctgggcaacagaatgagactctgtctcaaacaaaaacaaaaacaaaaccacaactttttgagagttggaagaccatgaagtatagtacccgggacttagagtctggccatgaatttggaataccaccctttctacttatctgtatggcaaagggtgagacgtccatcctctgagactcagcactctcatctgagttgatctagttgatccaatggaagtgagcgatgatgaaaccgatcgtgggtgcccgctgcgtgatctctatgtgatggatgcataaagtaaaggcaaagtgaattttagatacattcattaatattttaagcttaaagtccatacaattcaccggaaatatcccctgacctgaagttctggtttccctgcattccaaacaggacattttgttttgtctttgtctcggtaagtactgagtattgtgagaggaacaagtgagtgtcttctgtttctgattccccagagtctatatcttgcttggcacataggagatagcaaaaggaaacatctatgtcaattactgaatcgacacttccttggttcacaaacattggctgtcatcagcgtgacttcgacttacttgattcttttcgttttttgttttttgagacggagttttgctcttgttgcccaggctggagtgcagtggtgtgatctcggctgactgtagcctctgcctcccaggttcaagccattctcctgcgtcagcctcccgagtagctgggactacaggtgcgcgccgccataccgggcaaagtttttgcagttttagtagaggtggggtttcaccatgttggccaggatggtcttgatctcctgacctcgtgatccaccctcctcggccccccaaagtgctgggattacaggcgtgagccaccgcatctggccaaacgttcttatgaaaattctaagtccacctaagctaaggacaggagttatagcttacatgaattttaaaacaagatgcaccgatttgagtaagcaattactctcttgaaggagaaaagtcagaaagcataatgaaatcactaggacctaactggcatgtggaactattttctgcttatgaactatcaactttaatttcatttccagatggcatggtttcagctgttatacagtgtttataaatgttctaaatcaagggaatttgtatcaatctattagaataaaataaaatatttgagttcttaatttcctttaattaggataacctttttcttaaagtgaagagaatggttttattacatatttttcttcggaaaagataggctatattttctagcaattacgaatttgttatatatgatgatctggttcttggaacattcttgaatctagtgtctctaaggcaggtgtgtagagcaagaagtgaataacacagaaatcaatgatgaaagcattagaagacaattgagtttgtcagaactgtaaaatattgctgagtgtggattgctctgaaatctgaaaacatgacttgtgaattgcttatatccaaaatgcagacacaatgctgggtgttggtttacttgtttccggtttttcaaccctcttttctaagcaaaagatgtccaaactatacagacccacagaatctaacagatgtctttatattcctcctcctagaactctcagaggatccagcactgcagctggtcgtcactgggctgtgcctgtgtgcctggtcacggtgctgtggaacctgctcagcatcctggccgtcagccctgactcccacctccacacccccatgcacttcttcctctgcaacctgtccttgcctgacatcggtttcacctccaccacggtccccaagatgatcgtggacatccaatctcacagcagagtcatctcctatgcaggctgcctgactcagatgtctctctctgccatttttggaggcatggaagagagacatgctcctgagtgtgatggcctatgaccagtttgtagccatctgtcaccctctgtatcattcagccatcatgaacccgtgtttctgtggcttcctggttttgttgtctttttttttctcagtcttttagactcccagctgcaaaacttgatcgccttacaaatcacctgcttcaaggatgtggaaattcctaatttcttctgtgacccttctcaactcccccatcttgcatgttgtgacaccttcaccaataacattatcatgtatttccctgctgccatatttggttttcttcccatctcggggacccttttctcttactataaaattgtttcctccattctgagggtttcatcatcaggtgggagctataaagccttcgccacctgtggatctcacctgtcagttgtttgctgattttatggaacaggcgttggagggtacctcagttcagatgtgtcgtcttccctgagaaagcgtgcagtggcctcagtgatgtacacagtggtcacccccatgctgaatcccttgatctacagcctgagaaacagggatattaaaggtgtcctgtggcagccgtgcagccgcacggcagcacagtctcatctcaatatcttatctgttccattccttttgcaggatgggttaaaaaaggcagcaaggtcaaataagaatgacatcccagggtgaacacccactgtgatattacgagtaatacctccctaggatataaaaaacactgtcacagagtatacacatggggtacacccactgtgatattagaagcaatatctccctaaaatattatgaaaaatatcacagggtgtgcagactgtgtgatattaggagtcatatttgccctggttattacgactaatatcaagggtgtacacacacggggtaaacttactgtgatatcaggagttgtatctccctgggatattatgaataatatcacagggtatacactatgtgtgtacatccactgtaatatttgaagtaatatctctctatgagattacaaataatatcaaagtgtgtacacccctgtgacatattaggagtaacatccttctagggtattacagataacgtcacaaggtgtacaccttctgtgacattttgtgcaccctttgtgacattaaaagaaacaaccccctaggatattacgaataatgacacgggcggtttacacacatggtgtacacctcctgtgccatcaggggtaacattcccctaggatattacgaataatatcacagcaggtgaacacacatggtgtacaccccatgtgacattaggaggaacatgcccctagggtattaggaatagtatcacaggcgttgaatacgcatgatatacacccccggtgacattaaaagtaacatccccctaggatattaacaagaatatcacagggagtacaccccatgtgacattaggagtaacatcccccgaggatataacgaataatatcagagggtgtacacgcattgtgacattagtagtaacagcccgctatgatatgacgagtaatatcacagggtgtacaccacgtgtcacaattgtagtaacattcccctagaatattacgaataatatcacaggaggtacagcccctgtgattcacgagtaacatttctatagaatattacaagtcatatcactgtgtgactctgtgtacaccccatgtgacattgggagtaacatcccacaaaactattacgaataatatcacagggtgaacaccctctgtgacatgaggaataacgtagttttaggatattatgaatgatatgacaaggtgtacacaccctgtgatgttagaagcaacatccgtctaggatattaggaataatatcacagggaacacaccccctgtgacattaggatattacaaataatatcacaaggtgtacacgcattgtgacattagtaataatatccctctcatatactatgaataatatcacagggggtacatccctgtgacattaggagtaacatccccctagaatatgatgaataatattgcagggggtacacaccctgtgacttcaggagtatcaccgccctggaatatgaggaatactgtcccagggtattaaccccctgtgacctgaggagtaacatcccgctggaatattatgaataatatcacagtgtgtacaccaactgtgatattaggagttctatttatttttaggatattagggataatatcacagcagatatacacaaatagtgtgtacacctactgtggtattaaaagttatgtctccctagggtattgcgaataacatcacagtgggtgtacacccactgtgatatttgaagtaatatctccctaagatatgacaaaaaatatcaaagggtggaccccgtctgtgacatcaaaaataacatctcttgtggatattccgaataatatcactggggagtgtgtattggggaagggggcctgtggggagaaagtgtatgactgaaggcctggaaatgcccaaagccaatcccggcttcataggaagactgataactgatagtggatagaagggggatggagccttagggggaagatgtgttattatttctagtactgttgagacagggatcacccaaacgctggaacaggcagtactggtctgattggcaaatgtctatctcgccggaaggagaaatgggctactatgttttcttagctcctgactgcccgccataaggtcatgccctttctcttgaatccaattctgtacccatcaacttcttaaaattttacagtatagccttccagatagagagctacatgtccacaaacttacatattttacagggtctcaatataatttttaataatattgagaaatgtagaaaatcgttgcataagaacccatgtactgaccatccagttttgtttaaatatgtaggttagtaatcatctagtgattattaaaatcaccacagatcaagcctgtgcagtatctttaaatttgtcagccctggtattcgttgtcctcatgactttattataactgcattctgttcagcattttcttttttttcttttttctctttttttgagacagagtctcactcttgtcgcccaggctggaatgcagtggctcattgcaactgctgcctcctgggttcaagcaattctcctgcctcagcttcctgagtagctgggattacaggcgcctgccaccacgcccagctaatttttgtatttttagtagagacggggttttgccatgttggccaggctggtctcgttacctcaggtgatccgcccgcttcagcctcccaaagtgctggaattataggcgtgagccaccacctggccctgttcagcattttcttaaggtccttttcttctcatacaggtcttgtcttaaatatctgtggttagctctttcttggtgtggtttcagcaatcataaatcatgcaaagcctgttgtcttgccctcaggcacccaagtgacttctgaatctgaagaccaagatgacacctggtgtgtggtcttgtgagttttggctggttttctcttagtgttttaggtgctgtttctgttctaggatgaagagcatcttatgaccatttgtatctgttaagcaattcatcagtgattaacgtcctggtctggataatttatgagtcattcatgatggctgctggatgtcaggcagccagaaagaaaaagagaaaatttaactctattgactactttttttttgtcctaatacactacagatacagttaaagcccccacatacctctttctaatcccattctcgtcttcttctccagaggtaaattgctattctaaatttggtgtttatcatttccattgcatgttttttataccattaacgtgtatgtacccctaaaaatatatcctcgtgtattttaaatttttttattttatttatttatttattgagacggagtctcacactgtcacccaggctggagtgcagtggtgcaacctcggctcactgcaacctccgcctctcaggttcaagcgattctccttgcctcagcttcccaagtggctggcattacaggcgcccgccaccaagcccagctgatttttttgtatttttagtagagatggagtttcactatgttggcctcgaactcctgacctcgtgatccgcccgccttggcctcccaaagtactaggattacaggcataagccaccgcgcctggccttttaaatgttatataaatggtgtcttactattttgtatcttgctttatggctacaccgtgaggttttctcgtatgttcttttcactcacttattttcactgctgtctacgattccactgtatgactatgccactccactcccctgttgatgtttatttgtggttttcaccattacaaacaatgcctctcatgctccacaggtcctagtttctctagaagtcggatttcttattgatagggtatatgaattttacctaacattgttaaattgttttcttgagctgatgtgccagtttaccctttcaccaaccatgttaagagttcccccctctccatataattggtaatccttgatacagtcagacatttttctaacattaataaattggtgttttaatttatacatcagtttcttgtgagtttgtttattacatgcctatcacccttgctatagtttctggtcctgcagagctcagaatctggctgtgggtcatgtaaaaacgatgaagactaagctacagactggagaagtatctgcaaaccatatatccaatgaaagatgagtagaatctggaatatgtacatagccctcaactgtaaaaacaaaatccatttagatgatgggtaaaataccacagacacttcactgaatataagatggcaaataagcacttgaaaagatcttcaggctgggcacagtagctcacgcctataatcccaacactttgggaggccgaggtgggtggatcacctaaggtcaggagttcgagaccagcctggccaaaatggtgaaacccatctctattaaaaacacaaaaagttagctgggcatggtggcaggcgcctataagctccactacttgggagactgaggcaggagaatcgtcggaaccctggaggcggaggttgcagtgaaccaagattgtgccactgtactccagcctggttgacagagcaagactctgtctcagaaaacaaaacaaaaacaaaagatttttatcattagctgttagggaaatgcaaattgaaactacaatgaaacatccactactataatggctaaaataaaaaatagtgacaccaccaaatgaggaaaaggatgtggagaagctggattactcatgcattgctgatgggaatgtaaaagggtaggcactccggaagagtttcagtttttaaaaaactgaagcatgccattaccacataaccaagcaattgcactcctgggcatttatcccagagacatgaaaacttatcttcatagcagctttatttgtaatagccaccaaactggaaacaacccaagtgtccttcagtggatgaatggttaaataaacggtggtacatccataccatggaatactattcagcaataaaaaggaacagagtacatgcaaactagatgaatctccagagaattatgctgagtgaaaaaagccaaccccaaaaggttacataccatgattcaatttatgtaacattcttgaagtgagaaaattatacatgcggagatcagattagtggttgccagaggttaagggcaggggaaaaggagatgggatgaaagggcagtgggaaaagggcaacatgagggctccttatggtgatggaaatgctctgtattgttcatgtctcggtcatgctctggtactgtagttttgcaagctgttacccatgggggcaagtgggtaaaggggtacacggggtctctgtattatttcttataactccatattaacctacaagtatcttaaaatggtttttgtaagccaataattctgtaacttcttaataaaaggttaatgaacattaagaattaaagtaagaatttcaaatatcaatcagacaggtctgaaaaaaggcaatactagccttggcttttttttttttttttttttttttggtgagatagggtcttggtccgatgcccaggctggagtgtggttgtgtgatcatagctcactcactgcagcctcgatctcctgggctcaagtgatgccccacctcaaacttctgagtagctgggactacagggacgcaccaccatgcccagctaatttttttgatttttaccagagataaagtctatgttgtccaggctagtgtcgaactcctgggctcaatcaatcctcctgccttagcctcccaaaatgctgggagtataggcatgagccattgcaccttgcctagccttggcctctttttcttttttttgagacagtcttgctctgtcccccaggatgaagtgcaatggcgtgatctcggctcactgcaacctctgcctcccaaattcaagctattctcctgcctcagcctcctgagtagttgggattacagacgcctgccaccacgcccgtctaatttttgtatttttagtagagacagggtttcaccatgttggtcaggctggtctcgaactcctgacctcatgatccacccatctcggcctcccaaagcgctgggattacaggcgtgagccaccacgcccggccctggccttttaatttgggtctctttaggcagtccctttttctgattggctatttttgtcccaattcctctttgccccccacttgttccttctactttgggtaagaaaaatcattcatatttcttgtattattttcaagtcagcatgtttttgcgtgagggcctctcttatggaataagtgcatggacttttttttttttttgaaacagagtttcgctcttctcgcccaggctggagtgcaatggcacaatctcggctcactgcaacctctccctcccaggttctagtgattctcctgcctcagcctccccagtagctgggattacaggcctgcaccaccacgcccaactaatttttttttcatatttttagtagagatggggtttcaccatgtgggccaggctgggcatggactttttaataatgattagtaatctcggaaaatcttcttagttttagaggaagcactatctggagaaatgaaaataaggtcttgaattaaaatatctgattcggcaataagggttaagcttattttgtttgaacgtcaccaaacttgtgtatgtaaagtacaaggaaaatggctgagaaaaattcttccctttctaacaaagaagtcagcatggtaaagacagatatatttatttcatatgacagcacgtttcacaggatatgtacagaatgtctgtgtaccactgactttaatactgtacttctataaagtttatagttataaatattgtatgccacataagcaataaaattcttacatataaacagcaatctaatatagagaacacagagttcacaaagagatccttagtgtctaacttctgctctgcttttaacagaactagtaaatatttaataatacatagaataatggctagttatttgcagcatacctttaactttcataactttgtgcattttcagcaacttgccaagtataattttcctgataaaggctgggctgctgatatgtatattttagacagtagtttatattcaataggaaacattgctcacagatctgcaatttgcactagtgaagtttacctaacaatgaattattttgctaatggagagcaaataccatatacactagtcacatggatgttaaagccacagtttcaacaagttaattcacattttgaagcaactgcttatagtaatactgctgtttaagacgctactgctgaaatgattagaacctccaaaaagcacaatataaaactcacaagagttatttctaacagcaaatcttggctgttaacagagaagattacttctataaatatagtattttgataacatttgagcatttagaaaaatgctttttttctaatagatttgctttataagtgcagtgcagtttgctgtgcttttaacattctacatattcgtagccatgaacgctattttttgatattccctcaatgtacatctttaaaggttaagtgtggacataggaatttaggtggacatatacaactctttatataaaaggaatgttaatgtaagtcttaatgggtaaagatgattgtaactgaaactgacaaagaaacaactattgctcaaggagttttctgattggtttacttaatgatatcaaaatactacattctgtaaaaattctgtgtacttcttcaaaaaattaataaaagcgggatcagttgcatattggcagtgcaggagacaaaatccgcagctactttgaggtatagcctctaaaaacttaaagcagcatcatagatgtgttatgtagcctcgtaagaggggggagaacacacactgggtatattcccaattcaaagcactcaggggacagctgctttccctgctaaaagcaaagttccagagcaaaagcagcaaaaagaaaatatgggagggatatgggcaacgtatactcgaacgtacgcagagaagagagtacggttagctctaatatttctcattgaacttggtggtatgtgccttccctgcatataaggccatagtgcttttttgggagcgctagaatatccatccacttgacagtgaccacaaaataggctgtttccagctgcaagaacctcctcctggagaaaagcgtatgaaggtgctggagtgaaaagtaacaaggttgtgtgtatttgaaggggttgggtgtggaacggtagaaaattctgattctgtggtgagattattctagttttgaaaacaaaattaatgaaaggtccaaattacatttgcagccatctttttggtaatgtgatattgaaaaagggactttgttggaacttttaggtataatttggtctgagttatagcctagaaattaaagtatgaattgtaaaaatatgtaaatgtatacagaagtacatgtgtttgtatgtattatatatgtacacatacctatacttttttcctttaaagcaatgcctttcaaaactctgttcactgtaaccttggcagctctttggtaaatactcaaagataccaattgttaacaagtatgagagggctggtggaaatgtcagctgaaagttgggtgggctttttgagattcttcagaagactgaccgaaaagtttctgaataaggactgttttctaaagtataagtactttttatggctactactgtctcctattcatccaaagagaaatacatcaaaactccagttaacaatgagaagggtttttccttatttccaatatacacatagtccaactctgtacacatcaaatagtggtgttttgtgaagatatcagtgcacttacaatgacttattgcacataatgaaatactaatgcccaattctcttagctctatcctgccaaaagcaagtacccactgttttctattgcatggcgttatctttctgtaaagtccagtgtgggtgaagccttagaggccaaggtcgtgaaaggatctactggagggctggtgccgggcgggagcagagggacaggaggtggaggaggtcttcttgacggcaacacacagaaggagacatttgtacctttattccagtcatcattcaatgtcaggttggagccagaaaatgaacttggctgattacccagtaagtctgaacaagctgactttgacttccctttcacaccaaaatcctcttcttcctcgaaggttacccatcctttcgggttgctaatttttaatgtagactggccctgtagatcaaaactgtccttaaagccatcaagtgaagatgaagccctgcttttgttatgaccaagaggctgcagagaagggaaaggactgatagtaacgggctcttctttggagaaccatgaagttgcctctgattcttcagacttggctctaaatgggtttccaggagcagcagtcctgtcactgaaaggatttgtcctggtcaagccagtaataaatgggtttggagaacttcgcatattttcctgggattgactccgagctggaattggaggcattgttggcatgcaacttacagaactcaaaacattactttgcgttgcagaaggcaactgaatcaacctctttgggtctggggtgggaacaggtgacgtttgaacagatagctgagcctttgatacagcaagcagattaaatgacagatcttcaaatgggtcaatctttaatggtgattctcttttgccatcagagattccatttgtttttacctgcaaaagaaagggagcactgaaaaatcagtttatatttactcttaataccccctattcttcctgtctcaattattcttcccttttaggggcaagcatgtaaatttagaaactaaaaagtagctttgtgtagtttgttactccggtggtttaaataacatgaaacacctacagtctttaaaaacttctttctaaataaatcctttctaattaaatccatttttaaatccctcaaaatcaaagagcttatttcattcatgcaagttttgaaatggtaagaaggagaattgtacagaattaacaaatttgttcatgcccagttctatcacatttcagcatgaacttaagaaatccatacttataacttatgctaaatctatataaataaaattctaacacccatctatgatgatgatgtggtttcattgttcttttaagtgtgttttctaaaattaatgttactatggaaattcaattttatagataaaattaattctattagcatattttattcctaagacgaagactccatctttctgtcttctacttggaaaaataaattttgagagttctttgcccaccccctcttttttttttttttggagaccaagtcttgtgctgtcacccaggctggagtgcaatggcacgattttggctcactgcaacctccacctcccgggttcaagtgattcttgtgcctcagcctcttgagtagctgggactacaggcgtgtgccaccaggtctagctaattttttgtattttagtacagatggggtttcactatgttgcccaggctggtcacaaactcctgagtgcaggcaatctgcccaccttagcctcccaaagtgtcaggattacaggcgtgagccaccatgcccggcacagctgacttttaatgtaagctctcctttgttgaataaactgagtaatgtgaggctgggcgcggtggctcaagcctataatccctgcactttgtaaggctgaggcaggtggatcacctgaggtcaggagttccagaccagcctggccaacataatgaaacctgtctctactaaaaatacaaaaaattagctgggcatggtggtgcgcgcctataatcccagctactcaggaggctgaggaaggagaattgcttgaacctgggaggcagaggttgcagtgagctgagatcgcaccaccgcactccagcttgggcaagagcaaaactccgcctcaaaaaacaaaaaacaaaaactgagtaatgtgacaactttccataaaaaaattgaccctcctgtcttgtaaaaatattccaaaacagatacactattagtaaccaaatgcaaccattgcttaaaaccagaggaaaaaaagttccattttctatttggtttatgaagtctacaaccacaatgatgtgcctagagtggtgcctggtcccttctatgtgacagagttggctgtgaactgttatcagtaggaagagtgcttggaattccttcactcctgccctaaatcccttggtccctactccataaagaaggtggttggagtggagcacagccaagggactgagcaaagacaaatgatcggatgaaggaaaagaactatgattcttgcctcataagcaaattagcttatcaggcatacattattaattttgaaaaaaatgtatataattcttaaaactagggtagatgacttggacacttatgctaacttaagaaaacttcagggttggatacgatagggcaaaaaaaaattcagttcaagactggcaatgtaataaaatgagcactgcccaaaaggaatttggatagttgttaaagcaacataactatactttcatgaaatatattggaaaaaaacagcagcagtctcaataaaatgtaactgcatactatgaaacacttagttactgcttaagaatatggaaggatgttcacttgtaaaaggaaatggatgacttaagtgaataactttcaagtatctgttttattcaactatcctagaatatgctttataattggttgaaacagtatatttttcttcaaacttagtgtgataaatttgtacaaaactaaagagaaaacatgtcacagactttaaactgtactctaaatgtcttaggtaagtagacctatatgtggaaatgtacttaaaaggaaatttatatagatattataaaattaactctatattaccaaaaatctctggactatttatagttaatacaaaatgaaatacttctgtctgagacaaaattctcctatggcagatagaatcgtctgcaacacagacattataggaaaggagaattttgtgctctgccagcttagaacagaagtcacctgctgcatcagtgctatacatttaaacacctttatttgcatatataagaaaatttttatttcaaaataagttaatttgatagaatcaggatcatttttcccagacttgaaattacaatgacaaccacatcaccattcatcacattagaattaatttgtaatctaagcaggatttgtgatgacaatattaaaattggtgctatttttacagagaaaggtgttggaaggacctttagataatcttgttatactggtaactttcatctttctaaaccatcaattcttccttaccaataacaatcttgctactaaaaccatttgaaaaaatatttcccccaaatattttttcctaaaaaacatactgaattttgtgtttatgtaattacataaatgccattgttaaaaccaagaaccgatctggttttgccaaaaaggccttcatatacctaaatcttactttcttgaagttacactttttagttttgttaattttcataaaaaaatgaagcaaaaagtggtaaagcattagcaagaacaactacatggttcctaaaatccaaaatactaagaaaaagaaaaagcaggttttatggtatgatagaatttattaatggagacaggtggttttaaaaatgggtgaaactttagatgtatgaagcagagattcatacatctaatgtgttgagacggatgaaaacacatgtaagattgataaattgtcagatacctgttaccctgatggttgctcctgctttgagaaaggaaacagacatcaaaggaaagagttaggaggacaatccgagatcaaccagcaaccctaacaattcagtcaacaaaatgctttctaagttacagacagaacccaagagcagcaatatttgcaggttgtaacataaattcaaaagacaattccaattccttttataattttgttgaattagggtccagactttagttttgtctgaggttgattactaaccagttcagttttgttattccaaaaataatactccaaatgatttcagagttctaaaatattttaagcaacctgttatggactgaatatttgtgtgctctcccctcccaaattcatatgttgattccataagcccctgtgtgatggtatttggaggtggggccactaggaggtaattagagttagatgaggtcatgaaggtgggaccccatgatggaatcagtgtccttatgagaagagacaccagagagcgtgtgcaagggtgtgtgcatgctctcattccaggcaccacatgcaatgaggctgtgtgaacacacagtgagaaggtggctgtcagcacaccacaaagagtgccctcaccagaactcaaccatgctggcaccctgatctcagacttccagcctccaaaactgtgagaaaataaatttctgttgtgtaagccacccagtctatggtatttcatatgtcaacccaagcagactaagacacagccttaggatagcctagggatgtcattattagagaaaatggcaatgtaatggtacaaaatggtaccatttttggtacatactattttgcaaaaagactaccctactgaaaattagtactcatccagcttgttttatcttactcaaattttctgaaggatgatactcttaatatcattaatttacttcataatgtattagttggaaggtacaagaaacttgtaccttacaagaaatttggaatttacctttgtttaaaaatgaaatcataatccctctataatataccattattttttaaaatctagtatcctcaagcaagttttgaggtaaatcttctccaatatctaaacctattactaaatagcaaaactaattttgacaattcagagacatcacccagaaatatattaagtactttagaatttcctgcctagtaaacatgagactcttatttaacactcagagttttatgtatcagctctggcagtggacaggagatcaggaataggtttatactgagaggtacaaggttgctgtatcctccattaaatgggtctagaatgctgtgatttttctaccaggtctcacagtaacagtatagcagtgagttcggttcctttacttccagttgcatttccttatttctggctctcagctgataaagatgactaagatgctagaagtcagatagataagtgaggattttttatactttgtaaaggacgtataacatgttatataatcactcgaattaaatgaatctcttctatacaaaattataaagtcaaaggataaataataaaaagtaaaactgggtcatatacattatgttttaaataccttgtagatttggaataggataagtaaagacttgtaaaaattacaaatgttcaattctaaaactatttcatgtcattacaaaatatcaaacttgtcatatttaaaaatctcaccatcaggtttgaaaatcttgtaaattgttcaacttaacagctacttccaataatttaaaattttttttattatttttaaaataggcattattttacggttcaaaattcaaaaggtacaaaaagatagaaagactcctcctcacctgcctcctggcccccagcattgggcattccctggaggaaactgtaaccactttgtgatccctcacaatgacactctgcatgtaaacaagaccccaccctccaagaaagaaaagtgtgtctgtgtatctaatattaaggagtttgatatcaatgactgaggcaaaaagatacttcaggatttgaaacaaatatctttgtctttttgatgaactgacaaccatgagattcaagaacacaatctaagggggcacacacaaagcatgtgcccgtcggccaccaaatcgctatactcacttcaatgaaaaacataaaacaatggaaagttttctgagaaaatgatatgtgtcttagaatgattttataatgataactacaatctcagctaacagtttgcacctccggaagtttttcagagtactttatctacttttgtattggtctaaggacacttaaaccatcagagttttagtaattatggcacgcaactacaatgagatggatgccctaaaacagtcctagaaagctcagagtggctagttgaaaaagttttttgcccttcaattacattttaaaaactacaaaagagtatacaagaaaataagaaaaattcacgattcactaaaaatggattagcagaaaaaaaaaatcattatttgaaagagttctaccattattatatattttcaccatcctcaatttttcttttttcttttttttttttttttttttgagatggagtctcgctctgtcacccaggctggagtgcagtggtgcgatctcagctcactgcaacctccacctcgcaggttcaaccaattctcctgtctcagcctcctgagtagctgggactacaggcgcacaccaccatgcctgggtaatttttgtatttttacaaaacaaaagagacagggtttcaccatattggtcaggctggtcttgaattcctgacctcaggcgatcgacccgccatggcctcccaaagtgctgggattacaggcatgagccaccgctcccagacttcatcctcaattttctaaactaaaaaaatatagaattctttttggtattaaccagcttaagggaacatttatttttctgtattatatatccttcaacttttacaaatgtgacttaataaatgctaactgctaactttattcatattgtattgaatcatatttactttaatatctgttttcaccctgtagacacttaagaaactgctcacttctgccaactagctggacatacctatatatctgtaaaaataaatgtaaactattacttataaatgtgttaaagggacattgccaatacgtattatttctgtatttcagatctttccaaagtgtaaaagaagactttttatttatttattattatttttggaggtacagggtctcactgtgtcaccaggctggaatgcagtggagcgatcatggctcactgcagccttgatgtcctgggctcaagtaatcctcccacctcagactcccaagtagccaggaccacaggtgcatggcacaacacctggatagttctttaatttgtagagacaaggtttctctatgttgcccaggctggtcttgaacttgcaggctcaagggatctgcccacctcagccttccaaagtgttagggttcactcatctcacagttttttcaaaagagtttaatgagatacttttaaggaaagatcactttgaaaattcagagtaggctgggcatggtggctcacgcctgtaatcccagcactttgggagactgaggtgggcagattgcctgaggtcaggagttcaagaccagcctggctaacatggtgaaaccctgtctctaccaaaaatataaaaattagccgggcatggtggcaggcacctgtaatcccagctactcaggaggctgaggcaggagaatcgcttgaacccgggaggcggaggttgcagtgagcggagatcatgccacttcactccagcctgggagacagagcaagacttcgtcttaaaaaggaaaaaacaaacacacaaacaacaacaaaaaacccaaacatatatatatatatacacatatatatgtataataacaaatataaaaagaaaattaaaactcgtatttatttttacttcttataacaggcaataattaaaataggtatgttcaaagactaaatcatatgcatcaaagataatattttgtgtaacaaatgagacttacttgcggttgtgaggaagcttctgaaggcaagctatgggatgacctgcttcgaggtggtggttgtggtggggtttccaaatttggctgggggccagactgaggcataggtgctgccacagggacaagaggctcttgcaacctttgagcaggcgggggcaaagaagactgcggaggaaaagcagcctgaggcttcagtggttcaggaaggaaagttgaacctaaaaaaccagtggttgtcagatgttaggtatattctagaaaaccatgtttttttccttctttagtgaaatgttaggagaacattctagttatttcttcccccaataagtagcctcatttcttgtggtataatgaaggaaggatatagctatctgaatatatgttgtagaaggtgggagatgacagaaggaaaaagagaaaaatatacaacaaaaccagtacagtatttctaatatagtatctacctttcttttctctcaatttttaaaaatttttgatttttgagacagggtcttgttcttttgcccaggctggagtgcagtggtgtgatcacggcttaccacagtctcaacctcccaggctcaagtgatcctcccaccttagccgcccgagtagctgggaccacaggcatgtgccatcacccctggctaattttaagagtttttaatttttttacaggcgggtctcactatgttgcccaagctggtctcaaatttctgggctcaagtgatcctcctgcctcagcctcccaaagaggacctacctttcgacgtttctgatgttttgctttggctttcaggagtcagtcttccagcagatgcccgcgcgtggctctgtggggcactgataactccagcacgaggaggaatcgtctacagataggaaacataacacttgagacatttacttaccttccacaggtaaaattctgtgaaaacatttgcttttgcatctcatttactttcttctatggtattagtccctaatttgtcattttaagtgctctctacttgaagccattataatgatgaattttaaaatcttcctgtttacttctgactatttactatgtgccagacattatgttaattaagtactgtacaggcatttccatttcatcttcaaaatatccctcagaagtaggtattattttatcatctctattttaaattaagatgaagaaatatatacaacttgcccaaagccacacagaaagcagagccaggatccaaactcaggtctgactggctgcagggctagggttcttaaccatgtgcaatgctgtctttatggggaaaactgggatgattttaaaatatacaaggagatagagagatacatacctgagcaactaggagactttggggaaaaaacaccctgagatttgttttttttttggtttttttttgagatggagtctcactctgtggccagacgggagtgcagtggcacaatctctgctcactgcaacctctgcctcctgggttctggcactttcctgcctcagccttccgagtagctgggactacaggcgcccgccaccacacgcggctaattttttgtatttttagtacagatggggtttcaccatgttggccaggatggtctcgatctcctgacatcatgatccacccgcctcggcctcccaaagtgctgggaccacaggcgtgagccaccgtacctggtcaagatttgttttttaagagatggggtcttgctatgttgctccagctagacttgaactcctgggttcaagcgatctttccaatgtagtcccctgcgtagctgggactacaggtgcatgccactgccacccagccatatatattgcttttaaacacagaagtacaacttttgaatgactaactcaatattccgaattaaatacactgaaagactcatcagtgaaaaatattttttctattttcatatgtttgctgaaggatctaagctaacaatatttattttaagcaaaatatgaacttttaaactcacaaaaatcctgactttcttttcctatacttatggtattcaacagaatcaagaaagttcttgtgccaagtgtggtcatgggatcagtgaatggcaaatttccctttttttgaaaaaaggaggataaatatttgaagagtaatattacatataaaaaagaaccttcagattgttaagtggacagctacaacagaaaagacaaaaagcttctatcttcataggaagtggtttcctcagttctcacaatcttaataatcttaatttctaggtacagtaatagctctcagtttcctactcttcagatatgggcctctcagtagtcccagctcctactggactagcctaagtcactgattactggtttctatttgctctttctctctgttcttgattacctgttatagtccagagaaagttttcaaataataaaaaacctatgtgtataagagaacatataaacatacagaaaagacacattcatcaggtagggaaaaatcctgtaacaacatctactctcctatttctaatacctttacggaatatgatgaacctgatcaagaaaaaaaccaaaaagagaaaaaaacctttagaaccagttttactatactgaatttatcatttttttttctgaaatgtaattaaaatcctttttaatgaaggattactttatatcttcattaattactcaggtaaaatgataaaaagctgcccaaatccatcatttcctcatatactgagactcttaagatatttatttagtgaccataattgttttaagtgtatcacttttatccaaataatgaagtttgttatttttgaagagtatgttaaaataatgttagagtcggaagatcatcaagtgcaattccctcattttagagatgaggaaattgaggccttgaagggtcacatgatttctccaaggtaacaaaactgactagtagtaaacaggacttagaaccgagaccccttggccccaggcgaggttttacctaccggtctggctgtactgtatccagcaggtcctgggcctgcaagtcctgcttgaggtgaaggctgactgcgtcctggaacaaagacatcatatcatatatttaagtttaaaaaaataaacaagaaaccatgtacttatattccaagtgtctatttcacggtccagttttaagggtgaatagctacattcaagtgtttttacctatattatctttccttgttgttccagggcttttgggtgctttgaagcaagaagggaaaaaaaaattagttgtaagttaacaattaagcaatattgcataacatcagcttgctgttctgcttcattaccagcagaaatgggggcatgagatggtaacaaaacaaagcactttgctttgtataatgatgaagggtattatcagtcctgaatgaaatactccaaaagagagaaaaattacaatatttagatagacctttatgggagacaagtggtgactttagtttgatatctcactcatgggaccacttttagggtggcattccccatagaactctctcgtgaaccttgaaaacatacagtcagctgtgtgaatggtcacaagatgcggcactgctgccccttagagtctggcagacaagtggcttctgagcaacagacaggactgcatttgtcaaattacacaagaggctcctagtagcaatactttagggcttcacgctgtagatgtcactgtggataaggttatcttatgatgagatctttcggatttctataacaaaatcccatcattaagacagaagacaggcatatgttattaccaaatatctgccttatggaagacagtgttaaaaatatgttcaaactcattagaaaggtagctgaaggataaaatgaaataaattactcttggagccaaaaggagtaggagtgactatcaagggcagcatcttaaataaactctcctttttgtaaagaaattcaagtacaattgttataagaaatacatcagccttttaataactaaaatcataacaaatggcctctagtcttaaaggtcttttaaacaaatctggctcagtgctaatctataaaatagctatgttatctgaaatcaactacaaaatactatattcttggatctgaattaatagggtttaattataatcattaatttttaaaacttcagattagtaaagtacatttctaaatattttacttattctgaaaagaattttgaagacattcttaaacagtaatttcacaacctgggcatatataaactatatatgaaacagagtacaaacaacattaaggatctcagggaaattaaatggatatccattagaaactataggtgacatagaatgaagagaggaaaaaatacaaggtatacataaggaggggaaagagaagtttacagctggaccaagaaaagatttagtatgcctgcaaacactgcggggtggggaggtggggcgctgacactgagaaataaaatgagagaaccacttctataatgcaagagtcttgttaccttccatctctctcctagctaccccaggactgggaggggctccaatacctttttagagaaagaacagaaactatatattgttcagggcccacagcacagaatgaaaggcaggcacacaagacaatttccatagtaaactcacttttgcaaaaaggctcttttattgctttaaatttcttcaaagatatcaatacaaaccaaagtgactttagatgcttggcccaaatctgaatcctccctttactcaaacagaagagtagaaacaggatgacagttttctttttatgtatgcaattactaccagtagggaatttaaaaaatatgtttaatgaagacctttgctttaaaaatcatcttactccttatatccagagcaagtaaaaactctgatatttgatagtcaaaaggaaagaaatcataaatttctatgagactacgtaagtcttttgaagttagtttttgatgcattaattttaaaaactctaatgtactataatgacgtaaaggaattattgtttataggatgaaaaaacatgttgcaaacactacttacaaaagaattatgaaggggagcaatttttaaaattaagacagatttcactgtaatccactggcttgcctaacttttgacagattcattttaaatttattttctacaggatgttttcctaattaaagcagaagataagcaaaaattatcatggaaatttaaataaaagcaggagcttgaaaagggaaaaattaaatgttttctataaaagcaggagcttgaaaagggaaaaattaaatgttttctgtaggtcaatggagaaatgatcacttagctgtattcggcagaagctgtaatgctgaaataatttagctattcttatcacacgcagtcattaagatctacacacaggcaaagtcagtctgtagtaagacctgaattgctcagccatgtcactaggcaagctacaatagaaacagaccaggctacacatgcacagtgagccttagtaacactggatttgtaaaagttcttctgaggaattgtgaaaactcatctcatcttttcttgagatttagattaaataaacttgtcaaatgtataactccaactgagctctgtgagttttcatgtaaaccaaataaactatacttcaaacaaaaagtgaccctttgtgaataaaaatttccttatgaagaaaggaaaagaaaatcatacagttctttgctaatccaaaagcttttccactagaaaataaatgtatcactaatcagatacttgggaaatgttctgtatttactgtacctgaatgacttttaaaattaatataacttttgggtattaaatctttgtaaatgaatcgaccacatttattaaaaaaaaaattaggcctgatgaacaatcccagcctacctgggaaatgaaagcctttattagttttatttgtggattagttttaaactagaatgtcattcattttgacttttatcaaacaaatctaaaatgtctttcaggtgtaaaacattaatgaaccacgattcacacatgctaacaaatgtaaatggttacctccaaattcctttctagtgggtgcaggactcctagccccttatagttcataagaaaataggcagcagaaaggaaatgacattaaatacagaagtgaaatgtcaaagattgctatagtatccatgacatcaagtatcatgcaggaattacatattatctacgtactacaaaaactattattcaatgcatatgcttataattgaagtaacagcactatatttaatttaaaagaacattaaacaaatacatacaattgtacattaatacgtatgctctccagttttattatacttttacagaaattagtacattttaattattttatgcttataaatcatccagaaatgaggattttgaaaaaaattaaacctaattttacctaagaacagtttacatgcctaactagatcaaattagcaaaaacaaaataaacctctctggctggctggtgagaaggcagctaaaggcagctgtgaaaacaccttagaggaatctactctgcaaacactctaccttgtctgttgcgcctaccatgttctttagagaaaagctaagaaatagcaataatgatagaaaaaactgtaaaatccagaagctagagattggaaaacatgcaaaacattttaaaatagagtgaagaattttacatctagcagaaatggaaataaaaggttgtcacctgaaggcggaggaggtctctgtgggggagccgggcgtgtgggaggggcgaccgggcggggcggcggcggccgcttgggctccaagggctgggcggggtctttctgcggcagcggcgttgctggctgcgcgtcaataggagaacctaaaaagcgcacaggaggtaagaagatcagcttctaagtagctgttgacagaagggaacagtccttcatatatatgtgtaatgttctataaaatgtgcacaatggtgtaaagaaagggcatgtattttcagtatgaataacaaaagcagtctactattaaactgccctttggtaccatggcagcaataatgctacctctgtgctgacttcttacctaggcctcaggtgctgaaagctaatttactaagtggccctattgatatgcacaaagtattgtttgagttaagccattttgtagtctggccagtagagagaagaaaaagctcaaatagttaacgggttcataccatagaaaatcatcagttataagacatagacaaacctaaccacatagaaaaaagattaagaacaattgtcatctagtgacagttatagcaagtttcctttccattgagagcttatcatctacaagttttcctattctgtaccggagaaaacagggtgcactttatcacctaggtatgaaacttaaacgatgactctccaacatcaagcacattggccacaggaagccatacaaaactttcaaataaaatgcatactctgtgcactgggaggcccaggagttcttgacggtgctcggcttggtctgatgggaagggaaggtacaggaccctctgatattgtaggtgactggcagggactagttcggggtgaagagctgggggaagtaccaaggccggaacttgaagatggctggagatgctgaggaagaagttcctccacttcagcactatagtcatcaacatcacctaaggaaaagcaggcttgatcagagataactccattttaacttgctcagagatttttttcaccttaggttttaaaaagttaaaatacacaaaacaaatatgaacattatgtcattgcaaacacacatggattaagcatgaaggcatgtataaaaccacaattagtagaaatgcttgtttcagaagatgtaaaggtatctattgtctctgagcaataagatgtcaggtgaccaaccacttggagctggggtgacccaatgggctttcaatatgccccagagcagcttctccagtgcaagccaactcaagtttcctgctctccttccaaacctgtccactgtgctctgtggaactgccccactcccttgcctaacccaggtccagcctcagagtcaacaagctctcaggagccacacagtcttcccccagaaggctcctccctgcaaccctcaccccacaaagacccgctttgctttaattaagtaaacactggttctcccccagggtctcctcatctccacttacttctgggtaggaaagtgggcacaaggtaacccttgcaacctaactgccattccagaacattagtcttccaaccctgaacaaaaagtcctactgctctgaggctatgccatcaggaatttatgtaacatcctctacccccacttgctacagtcatctccaacgtccattcttccatttcctgaacccactcactgaggactaagcagagagcaagactgtaagtcaggtcccgcaccatctttctgcgtggcatcaaagtccatgtggacaactcgttcaatagcaaaatgccttggtcctatccttatggacattcgccttcactcctaaccctcacccctcagaactgcactcttctgaaataataaactcaaaagcttcactctgactttggcctcccagcttttcagttctctcccttggctactccttctcttttgatttcttcagaagccagggtttgatccctctaacttttacctccatctgattctgctttcttctgtacctaccttcagattctatggttcttcatctcaaacattaccctacttcactcttcttccattgcacgtgcttgacataaccccatccctgcactgattcccctgtttaatctttctgtgataacacttggattgctgactgcctctgctaaagaaaaccacccagtcctgacaactgcagtcacatttgaaattatgcttttcagtctcttctggcctaaagtgcctggcaattccatgatttgctggtttgctcttcccctcaccctttgctcttcaggagctttactgcaaaactccttaaccctcctgaaactgtgagctgtcccactcctgcagatcacttcaacacttcacagagaagagggaagtcttaagatgggaacccctacttcaacagcctgcccccaagctggagtctcattacatggttgtcacttgggtatctgaggatggaacaaatgggccccacccagcctaattttctcagtgacactgctctactattctgccttgcccttcccccaaaccatcagccctttctcctctacttttccattagcactgtgcattctcaagcctgtcccatccaaaaccaccaccctaggacctccaatcttcctagagcaattgccctcttctctttccccccaaactttcttaaagagttgtctacagacacttttctccacttcttcaccttccatccatatcaatttaccactatctgacttcatcacttctgagatcactctcatgaaatgtcaacaacagcttcccttcctgttattaaatcagaaggacacatttctgtcctcatttcttctcatctttctgtgttacaagacaccactgactactccccttccatgctccactttctttccttgatttttaagccatgaatttctcttggctctttgacatttctagaaacaattgccattgtttcttctcattttcttttcacgggcagccttcttctgtctatatttaaactctgtgtttccacatactcaatcccaggtctgtatttctccatattcgattcattctcttctgtctcgtcataatcctattggccaaagttatattaacaaatgcccatgctttgcaggctattagagctgccttgactccagagctctttcctgagcaccagactcatgtttgactgactccatgaacatctcaaattcaacatatccgaaacaaaattcatcttccatcccacacctacttctctctctgcatttcttttcttcatttactccctcacaaacatccctccataatccatttggatcctctttatccccacttagactgtgcacatgctttcttcttggatcactcctctatagcattaattccattctccctgagtctttggattctcaacttaaatttcaattcctctgggaaagcttgcccaatttcccaaatccaggttaagcaactttcccatgagctaccacaaaaccattcattatcacatttatgtcactttattataattgcctgcttacttacacgtaacacccaataagctatgagttctggaaaggcaagaaccacagctgtcgaatctccagcacccagctgtatctggcataaaggtactacataaatatgtgtggactgagtaaacaaatgaacagataatgtgaaaatgagataaccttgtaagacgttcaactcttaaatgtggtacctagctatacagggcattacaatattattataatctaaggtatgcattttaatgaaaaactggctagaatagcatattgtgttagaaaacaaatgcatttaaaaattttttcttttgataatgttgccatcaaacaaatgcatttttaaatcatgtttaaggaaattttcggcgtaattacttaaattcatttctgttcttagaatacccttttggaacttctacttttttacctcaactttaattattgggactaaaccatacaccaacaatactaatttgggtatttatccaataagaatataaattaacatttgtaaaggtcttaatatttgaatggaagaatggtaaatacatttaaagtatacgcaaaataaacacaatatgatgtgaaataaatttgttttgttttgttttgttttgagacagcctcgctctgttgcccaggctggagtgcagtggcacaatctcggctcactgcaacctctgcctcctgggttcatgcgattctcctgcctcagcctcctgagtagctgggattacaggcatgcaccaccacgcccagctaaattttgtacttttagtagagacagggtttcgccatgttggacaggctggtcttgaactcctggcctcaggcaatccaccctcctcagcctcccaaagtgctgtgattgcaggcatgagctgccgcacctggccaaaatacattctaattaatagtgctatgtacgtcccaagaagaagaagaaagatgaacttggaaaataagactttacagattggaagaaaacatatctagaactacaagaagtaaatgtgtttaagaaacaaaccttccatatcaaaatctgctgcaacctctgcatcttcaccaagcagggtagagcttgttgatgatggcaatgcaatgctaattttctctaaactcatttcttcttccaaatttttgatccagtctggactttttaaagcaatagttatagtccgattcaataactagcggagtaaaagagatataaaataaagattaacatgaaagctaactaatttggaataaagaggctgacttcgttaaactatgcaatggtatagacagttaatttagttagacaattcagctaactaaagaaatagttctttcacatatactaaatttcaaactagtttaaaggttgttcccagttctccctttaaacacctgtggtgataaataaagatcttttctaggatgcccagagatgcaagtttcctttgctacaaccactatgttttcctggccagatgtaaattcaccaacaactctgctacataactttatactttcttaattttgattcacagattaagtaattgttcccacgtgaaacaactacaaaagagacagcagaaaatctttaaaatgcatttcctgttcctgttcatttggtctttcctaacttggcatatggtcctaagagctgctatattgtcagctgctaagtgctaacctatacagttttagcatttcaaatgtcagaagaatattaagagaactgaacaccattttaaatcttcaacaaaaattaatcattctaaaaacagaatgacttctacctgtgaaactggcactctgccttctctataaatttgggtgacttttagactaaagtataatctaagacaaccaagacattataatcaaattatagcagatcgtgtcaatgtatttaaaaaatactctcaaaaaaacttgctgataacagcaagactctttggtcaaggacaaaatgtgcactagaaaggagttctcatttaaaacccatattcttataacaaacttgctttctaaatttaatctctctcccacatagtttcaatttcctttgtttgaagagtttcttaatgtgaacaagatgtgaatatttttggtatttgcaaatgaactgtgtagctgtgatcaatatgctgtgctgacagttggcacctttgtgggtacagatcttccttggctcaaagtgttactgatattagaattccttgaaggcataataatggagaggttgaaagttgctgaactgagtggcacagctgtgtttattagtaatttagcatccacactgagctttaaagtcagaatcctaagaattcataatcctttacttgccaagtagatatgagtactaaaatcaatccaatttcagaacttaacacgctttacaagtcatatattacttttcaaagtcaacaaaattcttttatattcatcaaaaaatactaacaagcattcttaaatacctatcaccataatggccaattaagatgtaattccttaggactatccccttggtagagaccagggccaaatgaaaaggaagaaatttagaagaccaaaaaaatattcaaaaagatacatagaggttcactggaatattggctttaataattaagaataggaaataatctagatgtctataggagtttggtttaataaatgtatatatttattcacaaaatgaaattaatgaagccattaaaaatgacatatttgtttaagatgtccctgacacagtcataagaggtagtaagaaaatagctttataacacggtttcaatttgtgtttgcgtatatgcatatcccatttgtgttaatgtgtttgtgtgtatataaaatcccatttgtatttacatatgtatatgctaatattaaggttaagagaaattacttcagaatggtagcattatgtgagtggtcttatttttaattcttttccatgtttcctgatacatgattttacatgagtatactagtattacatttaggaaaacaaacaaaactctacaaaacctatttcaaaagcaatacacacaaagaattttttttttttttttgagacagagtctcgctctgttgcccaggctggagtgcactggtgcaatctcggctcgctgcaacctctgccacccaggttcaagtgattctgctgcctcagtctcccaagcagctgggattacaggcgcccaccaccacgcctggctacttcttgtatttttagtagagacaggtttttgccatgttggccaggctggtctcaaactcctgacctcaggtgatccacctgtctcggcctcccaaagtgctgggattacaggcgtgagccaccgcacccagcctaatacatacaaagaattttttttctccaaagaagttgatgtgacagaagaagcagctcaggacagtgctcacagagttgctcagtgctgcaggaatcaggcctagagtacaatccatcttgtgcactgactatatacttagaaatttaggatttgggtctaaaggagttcagaaaaaaatgacagatgaagcacttcagagaagtaaaactattccaggccaacaatgtaagtttccgtcatcaatgacttttcaaatcacaggttaggaatatctccatttgttaaaaatttctaaaatacttcaatgggatggatctgttatctctggaaattaatttagttatgtttgaagaagataactaggtaagccaagccaatgaaacaaattcctaggaataatgagcacctctctcccttgttttctggtacataatgcattttcttcacttgatagaatgtttttctactatacagataagccagactacccccaattaaaactttaaaactttttgcatcataaaatgtaataaatcaaattaggtgctaaacatgtttccttcttagtctatatcaacagttaatatctctggggaggggccaaaataagcctaggctagtcagaaatccagtctaaataaaaaacattaaataactcctcgaacataccataaggtcttttcccctcccatttagataatcttgctgcatgtctataaaaatatcataccatcttcagacatttaatttcagaatggtttagaatcaacaaatgctaccttacctctttaccatttaggctcagaacattcaaggcagagcttccctccaaaaatgtaacccacattttatcttctacaaatctttaagaaaaacaataaaaaaccataattaataccatagacataacaagctcagtgactactcccatgattattgatcattaacaagggccacaagaggccaggaagtaaaaagtaaaggagggagcgcaggtagggctggtggtgacctggagagggcactcttcccctaaaaacactctaactccaatttcaaatactatgttaatggaacagccacaagaaatgagtctgtgcacctccatttgtgatcactgctaatccagtcccatccaatcctccatttcattgacaaggcaaaaagggacagaggttaagtgacttgttcaaagtgactctataaggagaatatgttacagggctgggatccaagtctccggaccccacaacccagtactatgtattttcactgtctcagtgacttccctgaagaaaatttcctatgatcaaaaaagatgagagttgccagtgaaagaaaacaaaaccagactggccccaagaagccttagataagttatgctccttgtctttcatcattgacaaacatttactcttttgggacttcaatggtctttgataggattccaagtttttacttttgaaataaaaaaactatcaagaggaaaaaaaaaataaaaaggacagaagaagttctgaagagggtcgcaggtatgtaatgaagttattattcaaaaaagaacaaattatgatgttatcagtcttattacagaaaatttggcgagttaaaccacaagttcagaaatctttacagatttttccacaatgagaggaaaacatgtacacacaaacacacacacacacacagagtatcactctccccctaaccccctacttaaactaggattccaaagtatgaattatgaatattaagaggaaaaggccaaaacaaaagtgtgcataagtacttcaccctggtaaaatcaagggcctggagggaaccgatttctacaatcccacagatatgaccaaggcaactgactcaatttctttggcataaaactaaattgcaggatgctatcctttgaaatacacagggagaccattcttacctaactacacgaaggtatctttttcagattgttggcaatggagactatccctcctccaaaggttataatcaccactgtaagcatacatttatgctgcaccagtcccctaagaccccaaacattatttgttctttgataggtaccaacacttttgtggtcctgggttagggctaatatctttgtccttattctcaatcagcaatgtgccccttacacatttctaactttaacaagggattctggttcttatatctattgatttatgtaagttcttttggaagctatattttcttcctgctttcactcactacagtaaaagcttctagactcttccttcaattaatgtaagcatctatatgtatttaaatttatcccatacacatttccagggaacctcttatttaaaaataaaggggttcacagggtttactcactccttaatggctgtcttaatctagactaaaaggtaataatcagtttcttctcactacttatagagatcctctccttgttgactttcagtgtttgctttttctcttccaacttagtcatcttggggtttaacaaccaatattccaggttggagacaccccatggttttataatgttaggttaatgccttagtttcttaccaatacttttcctaatgatgacaaacatttgtgggaaaccttctggcttcaatttaacaagttctttagaggttgggttataaagacaggtccctttcctgtatcagagtctttcatcccttatacagtttggattctttgtagctcagtgcagtattttacatttgctcaggaagacatttatctgctactctgctgcccactcacacagtctacatgatgcttctggtggtttggcatttctgtacttggcaaagtatactgtcatctgtacacttgcagatttcactgtgtactttcaagaaccttaagatttttgaaatgttttgttttgtttaatttgaaagctttgggatagacctttgtcaaaagatttgaggaaagtctaaacacaatttcttctccatttgttcatttactctctgaaaggacttgaggtgtctttgattttcactctgtagaagccataccatcttaattctgtggactacgccctttaggatctgggggtgtcattacacacatgctgactttccctactagattacaagcaggagttgtatcttccatttctcctctgctcttctacagcaactagtatagagatctgcccaccaaatatctatcaaacatacctaactaagcaaatgaatggtatttaaagggatttaatggtacctctttccctatgaaatccaaacacatgcacacatgcacatcattcagtctctcaaaactgctgtatagttggaagagaacatttttaaaacaaggaaacaggcatctggttctgcaaaaggcagatggctagatcaatgagggaaaccaagactagaaggaatgactcttgactagtcatcacatctctgttagaaattaaacatacttaaaattactcaaatttctttaactgaggcagggagggagtcattcttatctctccttaaaaaaaaatagcaatcacagcttcattttgttatagggttttgttacatgttctattgtataggaatcgtgagagttcatatctgaacttgcacctatttttgttttcaattgttcacataaagtttcactgtttagctgggtatggtggctcacgcctgtaatcccagcactttgtggggctgagctgggcagatcgcttaaggccaggggtttgagaccagcctgggcaacatggtgaaaccctgcctctacaaaaacaaaacaaaacaaaacaaaacttagccaggtgtggtggtgtgcacttgcagacccagctatttgggaggctgaggtgggagaattgcttgagcctgggtggttggggctgcagtgagacatgaacacatgactgcattccagcctgggtgactgggtgagaccctgtcttaaaaaaaaagtttcactattcatttaaactttctaagttgagaattcagttataaaaacctacagaataatatccacagtatgatcttgctttagtttggaaataaaaatactcatatactaaacactaaataaggtggtatctttcttttttaaaattctctccttccccaaataaggtgatttctatatagaaatgattgtttatgaatcacaagctacttttgcataataaacatcttaccttataagtataacttcaccaaaacttgcaaactgctgcagaagctcatcaatcaaggcatcatcaaaaaaattattttctggtaaagaacttttgattgagaccaatactgtaccatctggtggaccctgaactgcaattacttctttataaatgttttgcctctcttcagcttcaacttcaaatatatctatatcaatcagggcaacgacaggccttaaggcataaaggaagatagatgtattagaaatgtttttaaaagggtgtatttcaaacaaatttcaaacactattagaaaaactgagactgcttaaacctgtggtcagaagtcttcagctcagctcttccatagtgcagcaaagtgcctggagtccacgtgtacagaattttgctttcatcttgaaaactagcatttagaagatctagatcttcagctgcagtcagaagaaatgaaaacacaagagaagctgtataagcaggacagatcgtgtagagcaaagaggcattctccttcctttcatgagcttcagtggtttgaggctggaatgccagaaacacttggtaataggcaggcagtctaaatacctttaaattcgaaaggttttggtaaagttatcattttatgctttatttagtaaaaattaagatctggctttatttccaagattacttaaaggactgggactaaatggtgtttcataaacaattcaagagacaagtggcagttcaaaacatatgcaaaccactaaagttagcttaaaaacctaaattagcttcaattaaaaatttcacaaaaatatttccttgcttctctttacatgaaattatatgaaaataggctgaaaaattaaataagttattataaacagatctgatatttctaaaaatctgacatatttaaattttatttattctattccagttaatgtttcttgaaaaacaatattctcctcatttgatattatgtcattccctgcttcctcataagtttacattagttcatttaaataaagaagcccatttcccaacctgatctatcaaaaggccatttcctccttctccaaaggacacggtctgtccaggcaggggtgcggcacttttcactggtgtcatagtcgtcagaaaacaagtcatacttatatgtcggagcaaaggttacctttccttctaaaaatcctctaaaaacctaaaataaacatatacaaagtaagttattcccaaacagcaacaagttctgttttcattcagacagtcatccattaaatgtctattacatgctggatgctctcagaagaaatctgtatgcgtctgatgaacacttctagctgaatggaacaaagcttagaaaaataacctgagacatagcatttttcatacccatagggacaggagacagggaaattctgggcagaagtgggtgggtccctttgctgggtcccaccctcaagccaaaaagtctgttaccacagccccaaatgagaacttatatccctgttttctcgctcgaatgttgctttttccaaaaccacccatggcctgccttgcccccaatcctgtgcccataaaaaccccaggctcagctggcagagagaggagaggcagctggatgtcagagagaagcagcttgacttcaaagggacagcttggcagcacagttttggagaggagtctggccatgggatggctggatttcaggggaagattatcttattgctctgtccccttttcagctccccttcctgccaagagccattttcatcggcaataaaataccccatatttaccatcttcaattcgttcatgtgacctcattcctcctggacaccagataagaactcgggtgccatgagtgtgggagcataaggctgtcgcactgaccccccactaagctgttaacacttaagccatctgcaggcagcagagctaaaacagcactgtaacactttctgtggggcttcaggggttggaggcaccctcccctagacactgccacgggcctggtacaaagttcgctcttgccggtgcccaaaagcgctcaccccagctcctgcactcacttaccagaactccccctcctacaggggtggagtgcagtgggtcaagtgagcagagttcgccccgccagtgcccatgcactccagttcccacctgcgaagcagtcagggaaatatcctgcttcaataccacttgtttgacatttgattaaactaactacatgaataagggaattctgcctgatctttgagctatatgagacatttggaactgtaaatgggattctggaaacatctagcctgatatcttattctcaatgaggtgctgaggcctgaaaaggtaatgtggtgcccaaagattcaagtctggtgatcaccaggcaccataccagatggccactgatccttttacctaaaaaaaaaaaaaaatttaataaattcttcccaaattttgtggtcataagctttaagaagtgtttcaaaagtcagatgacatagaaacaaaagaaaagtcaataaccacaggacttaacccaaaaaaaaaacagccctaaagatgaagattctaaactatcaccaaggaaaaaaaagtttatccttctatttgaaagtgaatcttatagatacataatatatttttctttatgggaattattatgggttttctctttcctatttttattacttttaagggaggacaccaccccacatattgtcttatgcccaatttctgcctccaaagaaagaagaagtaaaaactaaaaggcagaaatggaagccacaagcagatagcccagcactgcgccctgggcctggtggttaaaaatcaacccctgacctaactgtttgtgttacctatagatttcaggcctgtatggaaaagcatcatgaaaatccctgtcctgttctgttctgattactggtgcatgcagcccccagtcacataccccctgcttgctcaattgatcatgaccctatcacgcggacccccttggagttgtaagcccttaaaagggacaggaattgctcactcggggagctcagtttttggagacgcaagtctgccgatgctcccagctgaataaagccctttccttctacaactcggtgtctgaggggttcttgtctgaggctcgtcctgctacatttcttggttccccgaccgggaagtgaggtgattaacggatggtcaaggcagccccttaggtggcttaggcctgccctgtggcacatccctgtgggggactccggccagcttgagcaatgcggatcctgagagcacttccgggtaggtaattgccccggtcgaacgcctcaccacagcagcgcatggcaggcccccatgagttaaaggaaaaacttatgttggccccagccctaggactaccagatttgacaaacccctttacactctatgtgtcagaaagataaaaaatggcagttggagttttaacccagactgtgcggctctggccaaggccagtggcctatctctcaaaacaactagatggggtttccaaaggctggcccccatgtctaagggccctggcagcaatggccctgttagcacaagaagcagataaactaacccttgggcaaaacctgaatataaaggccttccatactgtggtaactttgatgaataccaaaggacatcattggctaacaaatgctagattaaccaagtaccaaagcttgctatgtgaaaatccccgcataatcactgacgtctgtaacaccctaaatcccgccaccctgctcccagtatcagagagcctggtcaagcataactgtgtagacatgttggactcagtttattctagcagacctgaccttcgggaccagccatgggcatcagcagactgggagttatacatggacgggagcaacttcatcaatccacatggagaaagatgtgcaggatatgcggtggtaactttgaacgctgtcattgaagccaaaccattgccacagggcacttcagcccagaaggctgagctcattgctttaactcgggctctagaactcagtgaaggtaagactgtaaacatctacactgactcttgatatgcctttctaaccctccaagtgcatggagcattatataaggaaaagggcctgttaaactctaggggaaaggacataaaatatcaacaagaaattctacaattattagaggcagtgtggaaacctcagaaggtggcagtcatgcactgcaggggacaccagcgagcctccacctcagtggccttaggaaactcccaaactgactcagaagctcgaaaagcagcatctaccccttactgtgcatcagtagcagcccccttactccctcaaacacctgacctggtacctacctattctaaggaagaaaaagactttttccacacagaagtggggcaagtaataaaagaaggatggatcagactgccagatgggaaggtagctgtgccacagttgctgagagccacagtcgtactggccatgcatgaaaccactcttctaggtcaagagtcacttgaaaagttgttaggccggtacttctacatctcacacttgccagcccttgccaaagcagtagcacaatggtgtgttacttgctgacagcgcaatgtgaggcaaggccccacggttccacccagcatacaagcttatggagcggctccttttgagggtcttcaggtggatttcacagaaatgccaaaatgtgaaggtaacaagtatttgctggttcttgtgtgtacttactctgggtgggtggaggcttatccaacacaaactgaaaaggcctacgaagtaacccgtgtgcttctccgagatcttattcctaggtttggactgcccttacgaattggctcacataacgggccggtgtttgtggctgacttggtacagaagacagcaaaggcattaggaatcacttggaaactacatgccgcctactgacctcagagttctggaaaggtggagcgaatgaatcagactatcaaaaatagtttagggaaagtatgtcaggaaacaggattaaaatggatacaggcccttcctatggtattgtttaaaattagatgcatcccttctaacaggatactccccttatgaaatactgtatcataggcctcctcctatactagggggacttccaggcactccccgagagttaggtgaaattgagttacagtgacagctacgggctttgggaaaaattacacaaacaatctcaacttgggtaaatgagaggtgtcccgtcagcttattctccccagttcaccctttctctccaagtgatcgcatgtggatcaaggactggaacgtagtccctttgcggccacagtggaaaagacctcacaccatcatcctgaccacccccacggctgtaaaggagaaggaatcccagcctggatccaccacagccgtgtgaaacctgcagctgctgaaacttgggaggcaaaaccgagcccagacaactcctgaaagtgactctgaggaggatgacaagccctgctccagtcacacccggaagctgactggtctacgcacggccgaggcatgaggagaatcatcgtgggactcattttccttataatttggacttgtatagtaaaaacttccactgattttccctgcatagaagactgctctcagtgtatacatcaggttactgaggtagggtaacaagttaaaacaatctttctgttctatagttactatgaatgcctaggaactttaaaaggaacgtgtttatataatgacactcagtacgaggtatgtagcctaggaaacgactgcccagatgtgtgttatgatccctctgtggcctcccaggtccacagtttttgaagtaagattaaggactgaagactgatggggacttgtaaatgatacaagtattagccaaaacagaagaaaaaggggtgcccaaacgcataatcttgaaatttgatgcctgtgctgtcattaagagcaataagttaggaaggggtgtggcttttgattgggaaaaaggctatatgaccaaaaataagtatatttgtcatgaattaggactgtgtggaaatcaatgtggatactggtgtcatttgggccacttggataaaaaatgaaaaggatccagtgcagcttcagaaaggaaaaagtggcccttcctgtactaagggacaatgtaaccccttagagctagtaataaccaatccccttgatcctcgctggaaaaaaggggagcgtgtgaccttaggaatcaatggggctggactggatcctcgagtaaatatcttagttcgaggagaagtttacaaacactctcctgagccagtgcttcaaactttctatgatgaactaaatgtgccagtaccagaaattccaggaaaaacaagaaatttgtttttgcaattagccaagcatgtagcctagtctctcaatgttgcttcacattatgtatgtggaggaactgtaatgggagatcaatggccacgagaagcccgagaattagtacctacagacccagttcctgatgaattcccagctcaaaagaatcaccctgataatttctgggtcctaaaaacctcaattattggacaatattgcatagctggagaaggaaaagaattcactcaccccgtaggatgacttagttgtctgggacagaaactgtataatggtaccacaaaaacagtcacttggtggagttcaaatcacacagaaaggaatccatttagtaaattcccaaagttgcaaaccgtgtggacccatccggagtcccaccaggactggacagcccccactggattatactgtatatgtgggcatagagcttgtgccaaattatccaaccagtggacaggtagttgtgttattggcactattaaaccatctttcttcctactgcccataaagacaggcaaactcctgggtttccctgtctatgctgcccgagaaaagagaagcatagctataggaaattggaaagatgatgaatggccccctgagagaatcatacaatattacagacctgctacttgggcacaagatggctcgtggggatactggacccccatttacatgctcaaccgaatcatacggttacaagctgtcttagaaataatcactaataaaactggcagagccttgactatactgccctggcaagagtctcagatgagaaatgctatctatcaaaatagattggctctcgactacttgctagcagctgaaggtgggggtctgtgggaaatttaaccttactaattgctgtctatacacagatgatgaagggcaagtagttgaagacataattagagatatgacaaaactgacacatgtgcctgtgcaagtgtggcatggatttgatccgggggccatgtttgaaaaatggttcccagtgctaggaggatttaaaactcttataataggagttataatagtaataggaacctgcttactgctcccttgtttgctacttgtacttcttcaaatgataaaaagcttcatcactaccttagctcaccaaaatgcttcagcgcaagtgtaccatatgaatcactatcaatctgtcttgcaagaagacatgggtaatgaggatgaaagtgagaactcccattaatgagtgaagttctcaaaggggggaataagggaggagaccacccctcatattgtcttatgcccaatttctgcctccaaagaaagaagtgaaaactaaaaggcagaaatggaatcacaggcagatagcccagcactgtgccctgggcctggtagttaaaaatcaacccttgacctaaccgcttgtgctatctatagatttcagacattgtatggaaaagcatcgtgaaaatccctgtcctgttccattctgattaccagtgcatgcagcccccagtcccataccccctgcttgctcaatcgatcacgaccctctcacatggactcccttagagctgtaagcccttaaaagggacaggaattgctcactcggggagctcggtttttggagacgtgagtccgctgctgctcccagctgaataaagccctttccttctacaacttggtgtctgaagggttcttgtctgcagctcatcctgctacactttaaggaaagataattctattatctgtttacctacagatgcatatttaagtacaaaaagaccccaagaaaattttaaaacatcttgatttaaaaaggcatgtttcacgacccaaaatcttaatgcaagtattttctcaagtatagatatacctgtccagcatttttctgattgataagttgatctcctgctataagagaatcccaattttgctgtcttatgagctctttaacttcttcgttagggagatcgattcgatagttgaaatcaccacaccaaaatacatagtcatgggaaaatagcatccttccctgaaagcaatgagatagaattttaaattcaaaacaatcaatgttcaaaaatgttttacaactatttctttgcctgagatatgcttgtctcctcccatgtcctgtttctttgacccaacagtaataacacatgtgaaacgaaaataaatctcaggaccccaaaatcactaagcccagagaaaaatcaagccaggaactatgacaggtaaacctgcctcccattttactcctaaataagatagctccaaagataagaagctacataactccctcacaatttgcccacaggaaattccttgtggacaaagtatagactgaactcaaagtcatccctctgagactcacctgagacaaatgcacatctgactgcttcctctgccctattgtttatgcaaaaatgcagattcactgagccacactaaattgtgtattcagtggaaggctgatctaggacttaaaagaatgcaaccttttgcgtcttatctacttctaacctggaagcccccacttcgagttgtcctgccttaccagaccaaaccagtgtacatcatacacatactgactgatgtctcaggtctccctaaaatgtataaaagcaaactgtacccccgaccaccttgggcacatgtcattctgaattctggaggctatatcatggccacatccttaaccttggcaaaataaactttctaaattgactgagccctgtctcagatattttgggttaatactcatgaaatatctatttaggtgaatattcttaatgtttctaggaactatcttaaatttccaaaaacattgatgtagaatttggggcaaattaaaatatatttcaaagctttatcttcaagaacaagcagcaagagcttaccataggaaaactcaattttcgtgctatttctataaaatcttcatttctttctttgacttgtgactgccctgcagcaaagtggctacagacgaagcaaaggctggttgtatggaagagcattcggattgcaactgctcccttatttccagttgcacctcccattccagtcttcacagtatcaactgcaacatccctttgaaacaaagaattctaaatcgcagatttgaaatttcaagagttccatgtgcataggaaatgaggaatatacataatcatttaagtacacatggtatggtactttgagggcaagcctttgaaatagtacagtgaagctattggtgagtctttaatcaaaacccccaaaaccccattttaaaacaagaactatggatagtttttgtttgaagaactgaaacaataaacattctaggcttttttcttgttatttaatggtaggaagtagccttagaggagtgttctgtttactgacctgataaaaggagcatgctgtggtctgataaaaacaaacaaacagacgcccaccaactgttcagaagccagcagcacatacttgttgtctctggagattgtcttctgaagttctacagcccagagcttctgatttgttgtgctacaagaaaatattaaaaagagaattttttaaaaaggtattgacaatagcctattttatgacaattgtcaattatacctttatctacccaaatatcctaagactctgaaggaagcttaggctgtttttgtttcctttaaaaaggaaaatctacaatttagccaaaagaaaaccacatttcaaaatctaatctattacttctttacaaagaaaatataaagacattaaatggctactcactgggtgagtaaattcaaacttatacattttactttttccttaagtattcattaagatcacagagaagtatagaagtatctgtgggagattggtttcaggacctcccatgataccaaaatccaaggatactcaagtcccttacataaaatggagtaatacttgcatataacccatgtaaatctctcgtatactttaaatcatctctagattacctataatacctaatacaatgtaattagttgttatattgtaatgtttagggaataacgatacaaaaaagtctgcaagtaaaaaagacaaaaaaaaaaaggctacacatgttcagtatagacacaattttaaaaaatatttaatattttgatgagttgaatccaaagatgtcagacccatggataaggacagctaactgtgcacatatatgtgactatatgtgcttccaaatacatttccccacttttcaaaatttttctaaattataactaatgtctttttaaaaaatcttgctatgggaaattagaagacataatcattaaacaaaccaccatatacccatttcaaaattaccaacattttgccaatctattttttccatcctcttcaccttatcacatttaaacattaataattccttaatatcatctaatagtttatacttaaagttccccatttattaaaaaaaaatcttctaacagttggtttgtttctttaaaaagggtccaaacaaggtctacatattgcatttgcttgtcatgtctcctaatctctctttttttcttgagatggggtctcactctgtcacccagggctggagtgctgtggcaggatgtcggttcactgcaacctctgcctgagctcaagcgatcctcccacctcagccccgcaagtagctgaaactcattcctcatcttctcaatgaaccttatcttgatcattcatttgagacttccaacacttccctgtgtccctatagttgatctccttttcctctcttttccattgcacttttctaacatgctgtataatttacttattgttgttattgttcactgtccgtttcttcccactagaatacgaagtccatgaagatagggatttttgtctgtttgattcattggaggtacttaagagtggtactcagtaggtactgcttaaataaatgaataaatattcactactttattaaagaagaatatatatgtgtgtgtgtgtgtgtgtgtgtgtgtgtgtgtgtgtgtgcatgtgtgtatatatatatacatatacatatttgagacagagtcttgctctgtcactcaggccggagtgcggtggtgcgatctccactcactgcaacctccgtctcccaggttcaagcgattctccctgcctcagcctcctgagtagctgggattacaggcacggggcaccacgtccagctgatttttttgtatttttagtagagatagggtttcactatattggccaggctggtctcaaactcctgacctcaagtgatccacctgccttggcctcccaaagcattgggattacaggcatgagccaccacacccagcctaaagaatttgattaaacctagcctaaagaagaatttgattaaactctatttagacaaacaattgatccatgcacttagtactaggaaccctcagagttatagtctagtttaggacctgaatatatttttcaggaaacataatcaaacaacaaaatgggtgaagttgatttctttccaattttcctgatgtgaattgtttttcattttgcctaataaaatatttgtcacttgcaagattgatgactatttcagcctataattttctcctaaaaatctttaaaaatgtcataaaagatgggaaactgctgaaatttaaaagcaagcatactttgttaaaataaaacactgaagttttaagcctcactcatataatttgtatttataatatggattcagaacagcgttcccaaagtgtgatctggagacatctttgagggttcccaaagcccatggggtcacaactattttcatcatactattaagacatctttcactgtgttgactaacatttgcactgatggtgcaaaagcaacaatgggtaaaagtgctggtgctttcactcgaatttaggcaccaaactatactagtcatcattacaatccccactgccatatacttgcaggaaaaaaaaaatgccacttcgcctaagaatgtccttgatgaagcaacagacattattgattttattaaagctcaacccaggtcacatctttttaatattctgtgtgatacacaggaaatacatacaaagcacttgtgttgcatactgacttatgatctgtaacaaaaaaagaaaatgctttaaattgtgagtcaaactgccactttttttttggaatacaattttcccttaaaagaactaatgacagacggtggttattcagatttaggttatgtggcatttttttcaactaagcctgtctctttaagaaaaacaaccaagagcatttgttttcaatggaaaaacttgcgttttcaggcaaaaattagtattctggaaaacttgtatctgctaccatgatccttacagcttcccaacaattattttctgatgcagttaccaatgctggtaattaaccaatatgatgctttgatattatataatgaaatgtgttaaaatttggaagtgctacataacttagggaacccaagtgaccaatacatgatgttacaaaatcacgcaaaggtaaaagatgaattttagataatagagcagaaaaagttcatcaatatggtttcagattccattttgcaactaacctttaggacactaccatttggtatagtgtcttatccacacactacaccaagataatacttctctgttatctatactacagcagagaataaattatctgttttggtgtagtatcagagaagaaattatctagaaaggttattaaaatatttccttttcaaactacatagttatgtgatttttcttcatatacttcaatcaaaacaacatactgcagcagactgacacagaagtagatgtaagaatctggctgtcttaaactagacattaaagagatttggaaaactacaagacagtgccacccttctcagtaaattttttgttttgaaaaagttatttttcaaaaaatttattttaagttagcatgtaataggtttattattgtttttaagtgaattaaatgtttttaaattttcatttttaattcctaatataacaaagatataaacaacattagcaaaagttatttaacattctcaatatttttaagtgtgcagagagatcctcagacccaaaagtatgagaaatgctcttttacagttttacgagcacccttccatttattatttcaaactatccttgtaacaattacttaattatctgtcctccatagtttccctcaactggcaaatttttcagtggattaatgtggctagcttaccttgcactcacaatgtttccagcattcaattctaccatttcttcaaaaccaattgcaaatatatcagttggcttacttcttttatctaaaattaagcatccaagaaatacttttaaatatagcctcaggcaaatagcaaccccatccaacacaacataacaccaggtctcataaagactgatttctgtgttttgagtttaaccaaattcatattaaaggcaaacactcttgagtggaatgaaattattaaaatttactttctattagggtgtcctaagtttgcttctttaagacggttatccttgaagattcttaagccctttcagaattcactttgaaaaaactcttgctaaagtttttaccagggacagcacagaaacaaatcatttctcaaatcaaaatctcacataaaactggagagagaaattattcagaaaaggcacaaagaataaagtgactgagaaactacctcaaattgctggtaacagttgggaggaatttttcacattcatatttgaaaaacataatcttgatctttttgctattttctgggtgaaagaaatccaggaaaactaggagagatccagaaagtaagacacatcactctgtctagctgctggcactctggaaactacaaggactaacggagaacagagctgcctgagaaagcagcccagggagacttcgggtgccccaagtttctagaaatgaggacaaatagctagaaagagcctatatggccagatgctacagcccctgcctgtaatgccaaacactttggaaggctgaggtgagaggatcacttgaagccaggagtttgagaccagcctgggcaacatagtgagacccccatcactacaaaaaaataaaaataaaaaaattagcttagcatggtggcatgcctagctattcagaaggctgaggagggaggatctcttgagcccaggagtttgaggttatcgtgacctatgatatggagactgcaccactgcctgggcaacagagaaagaccctgtctcaaaaagaaaaaaaaaagaagagcctataaatagtctgaactaacactgaaattaaaaaaaaattattgactgctattatgtgcaagtctcatgcatacatcatcttatttaaactgccataaaaacatcttctaagaaagattatttttatcttttatttacaaacaggaagcttgcccaagttcacacataaaatgcagcctggcatacacactctaaagccaaactgcctgagttcaaatcctggctttgccactactgcacaaacatgggcaggttccttccctttcaatgtctcagtttcctcatctgtaaaattggaataatggtgtctatgaaataataggtcagctctgaggattaaatgaacacatgtaaggtacatagaattatagtgttagctgttattttattatcattactatcacaacttcaagttaggttcaattaagtaagaaagggcattttaggccaggtgcagtgcctcacgcttgtaatcacaacactttgggaagccgaggcgggtggatcacctgaggtcaggagtttgagaccagcctggccaacatggtgaaaccccatctctactaaaaatacaaaaaattagccgggcacggtggcagatgcctgtaatcccagctactcaggaggctgaggcaggagaatcgtttgaactcgggaggtagaggttgcagtgagccgagatcctgccactgcactccagcctgggcaacaagagctaaactcaatctcaaaaaaaaaaaaaaaaaaaaaaaaagaaaaagaaaaagaaaaagaaaagaaagaaaggtattttaataaaaagtttggggagaatcccagggtttaagatgaaactgatgaaaaataactaaaaaagaaaaattttatctcacaccatttcctatacacatcaccctcacatataaaacttggtaattatatactattttaaaaaggaattaaagttaatttttaaaaagaagaaaattaagttcatgattctaatcaaaatctttttctttctttctttttttttgtttttttgtttttttgagagtttcactcttgtcacccaggctggatgcagtggtgggatctccgctcactgcaacctctacctcctggattcaaacatttctcctgcctcagcctcccgagtagctgggattacaggcgcacaccaccacacccggctaatttttttatttttagtagagacggagtttcaccatgttggcgaggctgatctcaaactcctgtcctcaggtgatccacctgcctcggcctcccaaagtgctgggattacaggcgtgagccaccgtgcccagcccaaaaccttaacaaaagtatcctctgctaaatgtttggttctggctatttattaacagtttggtgcagagaacccaaactgaatgccaacaaagtttttcaaggataaaccagtgctcttaagttattacataagtaccaataaatatcacaagttttataaggctgctcaagacccactctgacatttcttatcttagtaactaaatagaggattaagaattgaaaaatgggacatagtaggtttgaaaaataaaactcaagtgatcaattatattttaattatgtaattttaattaaaattaataaatgatcaatgttaaatggacataatcttggtttatgtccataatcttggtttatgtccatttaaaataaaaacaaaactagattttcttatatgtgtggttgccttcaaagaaatctatgtgtgaattcctatttcctgagaatcaattatggaaaaaagattttttgttttaccatcatatatttttatgaagtagaaaataatggtctagaaattttaaaaagctgagattttaatagatgtgatctttaaagatgttgttggtcttcaaatgtatagctccaagtttctttcatcaattaatgcatcctctgaagtgctatatttgttttctagatcaatacaacacagtcaggatttattaactaaatccatattataaaaagccaaccttgaaactcctggatgccagctaacttgggtgcatcaagaagccagtcagtgagtgtctgattcttaaaagctatgctgcgaaattgcttcccaccattcacattccaggttccgacacatactcgaattttcttaggctttgaatatttgtagaaattctcacacatgctctttagtactttagaagatgctaatcaagagaagacacaatagaattttagctgcatcaaaccatttataaaaattgattttcataactgagatacgatgtccgctggaaagcacaattattatcacaagcacaaacaagcaaaagatacaggcacaggcacaaaaaaagatcagccttcaatgcaaagcctggtatgaggcaattaaccaacacatctttaaaaaaaaaaaaaagtcaacattaaatacaatagccaaagtaaaaaaaaaaatactacacatacagaattattgcagcaacatgcagaacaaatagttctgtttcaatgaaatggtacattaatgtacaaatccaatgaactatacatttttaggaatatagcaattaactttctacaattttcattaagagtctggtaaaaatataaattttatttttctccaaacaaaaacatttaagaacatttacatttaagattgtagctactgacaggcagcttgatgaataatggctccttgagaaaaatacaagctgatatttctgaaaatgaaatcactactaaatgcttcccatctcactcagagtggaagccaaagtgcttaaacaatggtccacaaggccctcaacaatttgtcttgtttttccaccctcatcttccactctccctggtgcactcactgctcagacactggccttcctgctgtttcaaaaacatatgaggcctgcttccaccacagggcctttgcactggctgtgcccacagcctgcaacactcttcccgcacatccttcaagtctttactttccaatgaggccttctctgaccactttatttaaactgcactctgcccttaactttccattatcccctccctgctttatttttctctatagcatttatcacatttataaactatgtattttatttatttatcctgtaactgtctcccctcatgagaatggaaaatccatgagggcagacatgttagtctgttttctttatgggaatactcctagtaactaaaagactacctggtacgcagtaagtgctcaataaataattgttaaatgaatgaatgttcaatacattttgaatcctcaatctctcccgtttttttttttttttggtctacaacccatcttttccctttctaaaccacattctatcctggttaaattctcagcatagaaccttaaaagcacctcaacctaaaaatctgtacttcattggtagctaaccggtaacaggaaaaggacatcaaaactactttcaccttttaccacatgatcttattttattatgatattctcttatgataccaagatatagcagtcttatgaggaaatgagagtgaaaaaggcgagtgatgtcttagtattcttgtaaagataattttgacctgtggaactgctgatttagataagtatatccccattgtttccaggggcagatatgcagatttctcaccacctagctgtttgctttgattgcttgtatagaggtgtctgggtggtaatgaaagcagattacttgtctggcctgttggtatggttaattcaaagctgactgtacctagataaaaataattctctataattatggtttatcattgctcttaaaaattgaagtcactgcttgttaccaatgcgaacatagtgtctataatccattctatatcaacacacaagttctataataattacacggcttaaaatattcagcaagacaatgaactgtgtgaataaaaacgtactgcctcactgtatgaactaataaagtcaagtcagtttttaaatgaaataaaaagataaaaaatagtcctagtttattcttaactggtgccaccttaatgtgcttaaagaaacagagagtcaaaaaaataaaataaaataaaaaattttaaaaaagaaatgagtctatgctcaaacaacagatgtccatccctaaataccatactatttcagaaaatggtgttcattatataactcaaaaatatatctaggtgctctcttcctctacccttctcgagaaaataatcaacagcttctcaaaacattcagaacaataactaagccaaacaattcttaagtgatagcaaatccttttcaactaaatttctggcaagagttaagctttcattccttttgccacagattcatgtttaaagacaagatcataaaccttgcccagagaatgaagacgtgagattcctaggaataaataggcaagaaaaataataaatagtctttaggtctcacacacttaactattctttgttagaaatcttggcactttttaaaattaaaagatttcagatcatattttagtgcaagtctatagttttgaaactatttcattcacaataaggaaatgcaacaatgccttcttaaatattatatgtgagaaacactgtttagtagttgtaaatatcacggatggcactcagaaattaattcaaagtagttacatctggatttttttccatcagcctattaagagtaaggcataacactaataatatttgttcaatgaaatgtaaaagtgaaattaaaactagctgaattatctttaactggaattaagcaattgctacaggaagacaaagagcactgcacattttcttcagaatgaagtacttaattttctcaagcttgaaattcttttctcagattaaaacaagatatcaatttatcctgttaggatctgatggcaaaatgagaaagtttccaattatatggctttatttgtttacaatatcgacttcagaaaaaataagaaaaaattgcttttatttatagattgattttctatactgtacctgactgtaatgtctgctcagaaactatggatgcaacaagaagaaaacaaagaatcattagtaaaaacaagttacaattaaaatgttgagtatagtgacaaaacattttgagaagacctcacttaagtcaatttgatgactttatttttttctgatagctatagaacaccaagtgttacaaataaacgacaatgattgatacaaaccttctgcacctaagaagaatcctacagtgactcagtgatatccaccgtttcaccatcagaagctcctaggcctgcgcttctggctgctcctgtgtgtatgttatgcatgcatgcgcacatgtttgagaatattatgaatataaatatgaaaacctaagaagatggaggatgttgaagatatggaagatactgccctaatacacaccttttagtattctttctgggacttagcagttgataagtataatcacttcagctataacaagaaaaatgcattctaaaaacatcaccatgctatgcaaattttgcaaattcccacagccacagggcttatgggaaaaatggggttggggtaccacgttcaaaaacttcaacaatgacacatcaaaaaagatgggaacctcataaaaatagtagcaagacattatacatgttaaatggttatgaaatgcatgaatataaccattaataaggcacttcatcttgaatgaagttggcttgtagaaatgggcatcaggcagagtgcagcttgtaatatgaataatggagaaagggatatctgaaattcaatgaaaagttgaaagaacagatgtgaatgtgtatggctcataacacacatagtgaactgaggcaggggaagatgtttgaggtgtgtgtgcatatgtgtatgtgtgttttatatgttgtacatatttctagccatcttagttctgctgggtgcacttttctgcatttacctagtgttgcttcccagcaaaatcatgcataagctcatgcaaaattggccttatgctcaaacagttccctaatatatcatattggaacaaattcccattctcagaacaagcgttacagcagaactgactgtacttttttttaaaggtatgattttacttatagtaaaatgcgcaggaaactaaaaacactaatgctgaagtttgaggattacataggtcccttgtttctcctcttctttccttcaaccacttactttcaattgttgcttattaatgcctccacatcaatgtaggcacaggtggaaagaggtgacaaaacacaaatcagtcaagtctctacttttggaagccaggaagaaagcctgaagttgaaagtagtagctaagatcagacattttttggagttttagtaggtctaagttccctagcccacttacaggtccctgaggaactgtccgtaattaactacctttaggcaccatgcaaattctaaaataatccataacttatttgaccaagtaattacccaagaatacattacttgatgcagaaacaattttctcccacttgaacagggaacattaaaaagtttggtttagggctaacagaaaaaaaatttctttttcagagtgctaaaaagttaaaatggaaaaaatttattttgtcaattatacctcaatacattttagagaaagaaaaagtaagtctaatctattaaattctacaatgaatgttgagttttcccgtcatgctacttttatgtgctcactgataggagaagtttttttttaaaagacacagtggaaggtgaaaacctattctgaaggtcatatatttatttcaaatattaaaattggtaatagcagttagtgcccaataattagcactactttaaattattaatatgatttaatgcttattcaaacaatagcaattaaaagttaagaccaagttacagaaacttttgggatagtgatttaaaaaataaccaatataggcattagttttcccagtaaagcatttttctgcataattagattattaaatgctgtattacaagtactagctgaatattctatgaaatactgccttgtacaaagttaacaatgcttaattatttacccctcaatcataatctatagaagaaaccatgcaagggcctcagtttacagcttagtaataccactgattgtacaaatattttaaaacagacaaacttcccttggagaatgtacttttcaaaaattacctttacagaaatcccttcaaaaactattttaaccaactaaaaattctgtgtaaataagtttacatttacctcttggacctttaggaatataaataacaaataaaatataaagtgcacataccacgcaaacttccagtagttaaaagtgctcgagctttgtcagctaaatcactattcagagtatttcccagtagcaaaacatcaatggcctcttgcttggagctgtcaaagaagttattctgaattgttcgggtaacagagcgagcaccatcttttaactttccagcctgttaagaaaggagcgcagattttcattttaaatattactgattttactcattaggttttttgaaattttaaatcagttttatatgattttagtataaaaaaggacctaatcgttctattttgaatatatagtcatgacaattaaaatgcctccaacatgtcactgtttcctttcttcttttggattaaagctctgcacaaagaaatgaaaaagctcagtgctacaacctcatccagtaattacatctagggcaacaaatgtttaaaattgcttattacaaaggaaataaactgaagtgaacttatttaaaacaagaaaattccttcttacaaggtaatttgtaaacttggggataaaatgggtaaggagaaatgggagataaaagaagatacactgagcttaactgcccctagaaaaacttcaaattactttggtagtagaaaaagaaaatggaaattgctcccaaatagcttacatgagttaaaattaaaactaaacctaagaatgaaggtctagtctcaaaagaaatttacaagtacagttcataaacgaatattacatgtaaactacagtttgtatattttgagtcattttattgcccatgcaaaaatacatcataagataataaacttattcctatagtgagatttgattataacttttaatgaatatatattttacttaggcatgttagttaccataatgatttattttgatcttacagattttgatgattgtcaaaacaaaaaacttgcgtcttttaggaaataacttcagtttgcaatatgtaatttttattctttaaagaaataacagtaactcaaggcttctttttagaataaagagccaattttcttaaatgccactaaatgaagaaccagttttcttcaatgccattaaatgaatgctactatatttaataagcaattaatgtttggcattaagtgttatttctttctatataatagcatatgcaaatgacattatttgaaaagacactcaccattcacattatcaggcaattaatcaaaaggaacccagagaaaaggaaaagaaagagcagttcagatgttagattttagttcaattcaggctagcatatttaatgtataaaattttatatctatatattatgttaaagataaaagaccactgaaaatatatgtaacctctgtacatatattgtagtcactgcagaaatgaaaaggtagaagtatataaaagaatattttaagcaatagtttgagaatcagcttttaatagcaagaattatgttgtttaaaaggaataaatcaaagtttaacaatttgatgtttacaaaaatagggaccacttaagaagtaaatatttgtaaaagtcaatacaaattatttctatgagttgaacaaaagaaactttgcaggtaaggccaatacctctgggcagaggcatggcatattatgagacacagaagaggaagacttggaaattaaaagaagacttggagaccatgaatggtctttaaagaatttcagttgctgtatggaagaagctgaatgagaactataaaagtgataaatgttctcatttctattcttgaaataatttgagaaattgtggagatttagaaagttgataaattcaagtgaggccaggatccttaaaaagttaaacaatatttaagaatataaaataatgaaaactatctcaagtattgttccaaactccctcaataagggacaaatacttgagaagaaagtagtctgtagataataccaggaaataaaaagtaatgatgaaacagacaattataattaagtccattcttttttttttttggaacagagtctcactctgtcactcaggctggatggagtgcagtggcgtgatcttggctcactgcaaccaccacctcctgggttcaagtgattctcatgcctcaaactcccgagtagctgggatttcaggtgtgcaccaccatgcccagctagtattttctattttcagtagagatgtggtttcgctatgttggccaggctagactagaactcctggtctcaagtgatccacctgcctcagcctcccaaagtgctgggattataggcgtcagccaccacacctggcccatatctcacacttcgttggcacatcttgatagccacctttctaaggtaagataagtaaagatcaattatgccctaatcttgggttcctagtaagcactgcataagctgttgatggacttacttgtccaagtggcatacgtcacacatctattaacagtaggcactgtgttaagtgcagggaacgcaaagccaaataagagagaaccctttattaagaggtctatggttttaaaaatcatatttgtaatcaaaacaaacaatacaaaaagtaaaacagatatacaagggaaatcatgaaaaaaagagcaatatatatcatcttagtggattgtcactaaatgactagatacgttatatatacatacttcccaaacttagggaaatacctatcttccatttattcactagtatccactgtgaaaggaagtatcaaagaaggcataaaagcacattaaacagaattctaagacacatctattaatttaaaccatctattaacttttaaaaggccatttaaaagctttatgaagagaggaaaaagaggatattctgtaatgttatgatagatctagatataccttcgctttcccttcaagagctccagttcctgcatatatcttactgattgaatcaccattcacggaccacattgaccgaaaaacttcttgaaagcgagtcaccaactgaggcttttcagctaaaccaagagcttccaactgtttagctagcatcttaaaaagcaaacaagaaatttttataagtacattaatatattaattgtaatatggcttttaagaactaccagaatcaaaccaaaaatttatcattatagcactatttgggactagcttctgaaaacataacagtttactaggctgagttatttcccatcatttcaatttttaaaacaaatactgtatcaatggaaactacaagtattgataaggacttctttctggttaaatgataaaatttatcttattaaagtatccctataaatcagagttgtttaccttgcccacctaaaagaattcatcaatcaacagcctgcattagaataaaaaaaagtttacttagtcctaaacataaataactaggtctctttaacttttggatttggctttataagtttaagtaattaaggtaaaaaaaatgaaaaaaaggagttgctcttaaattgtcacaaaataaagaaaataagtaaaacttctgaatgaagtcatgacagctttttatgcataaaatccacatcggtaatatatataagggaagaactagggggaagagcatgcaagaaattcaaggacctctcggcttccacaagtccttatcacatataacaataaaagtgttccaaaaagttattgatctttatatgcaagaattctagcctataaatctgacagagtcaatgttcgatctttatccaatctgtgtatttggaatctagtcatattctatgccttgcattttaacttaactctttccaatttacgttttattttatcatgtaagtatggtgatcatccataattatagaagaaccaaaagctaaaataagattaaaaaaaccttaaactgggttcatttaattacctagagacttacaccagagctgttctttgctagcatggagaataaaacaaaatgagccccagggcctcctttatcatttaaatctttcttcaaggaactgggcaaaactgatcttattcctctactagtttggctttgtctatcttggtgtcaaactttgtaacctgtcaaccaattgctatcctagggagttttctaattcctaactatcaacagtggagaatcagctaagtcagatcctgaaaactaacatctgttataattttgatgaagaggtccaagtacttcaataagcttattatcagaatccatgtacatttattcagccacttaaaacttgaaacaaatccaaggcatgtgataaactcttatctaaatgaccaacatgcttgctttcattttcttgtttctgtcaaattttctaaataaattacaaataaacatcaaaaacatactcaaaaaatccaaacagtaaaatttatttagttacatgaaaaatatattctgtagtagagaattttatacactgtactttcatttttgagataaagaacctcagctgcaaagtaactaattaaccaatactcaggtcaaatttaagatcattaactaaaggaaataagaacatgtaacttcctattgctgtttttttatagtatttgagaactatgttaagttctgatggaactaaacgaagtttagccacagccttataaccttaacttgcagaggagggaagacttagaaagctcagcattgctaaatagtttgtcaaagagttgagactatgtttatcttaggctgaatctgatggataagtagtaaagaaaaaaaaaaaagaaaaaacgttgcaaacagcgaccttatcagagaagttgaattgcattcattttcattctcactaactatggcattttcatctgatcctgtttttttatagctactaatttgaaaacaccaaacaaactggattggtatcagagaagttgaattgcattcattttcattctcactaactatggcattttcatctgatcctgtttttttatagctactaatttgaaaacaccaaacaaactggattgggttacaaattgtcaaaaatatagtcctatataattgtacatatgaaaatagacccttcttatcctaaaatagatttttaaaagacaacacagagaataaaaggccaaatacacacatacacccacacccacacatatatatttcctccaaaagacagggaaaaaattgttgaaatactataaacagcagattttaaaagggagaataaggaacaacagaagtagatagagagctacctaaagagaatatgaagatcaggtaaaggaaatatttaaatcaaaagaaagtttggccaaaaaaagagacagagattagaagtacaaaatgaagcataacattacatacactttctggaaggtaataagaaacataagtattcaaaaagcacttaaagaggcagatgatacaaggcacatacattttaatttattcttttacctctaagccaagaaatgcctgcacactatttgttctatcaagacaatccaagcagtttgttcgaactgtaccactctggcatctgtaaccaataaagttaaatatccagtttggaacaaaaataaagctaaaacaaacagtgaataattgaggtaattaaaatgtagcatccaccttccctctccaactttttattattacagtattcaaatatacaaaaaaaattatactgtgaacatccatatacccaccatttaaatttgacaactgttaacattttgtcacatatgcttcattacattatctatcacacacttatttttaattaggccaacaattagaaactaaatatacattcaggtttatgctcttacagttctttgcacataaaataaaaatatttatagaacaaaatttttttaaacctaagatctgttatctctaatgactgtgtctacagcattgatgctaaataaaatacaaattgaaaaattaaaaatttgagctttctgcactaaagtttcccttaacctatattctgaacttaactctcttaacatttacttttctcctctatttcacatacaaaaactgaatatttaaattatactaaagcagacagtaaacaaagcctttcacttctatttgcatttaataatctttactggcatcaagaaatattaaaacgtaagttttaaaagagaagcaaaacagtttcatatataacagcatgaagtatggagccagacgaatcccagttctaacacttgctaattatgagacttgcagcagatggaaatgggcataataatagagtctatccctataattgttattgatacatgttaagacttaagtacggccgggcgcggtggctcacgcctgtaatcccagcactttgggaggcggaggcgggtggatcacgaggtcaggagatcgagaccatcctggctaacacggtgaaaccccgtctctactaaaaatacaaaaaaaaaacagccgggagtggtggcgggcgcttgtagtcccagctactcaggaggctgaggcaggagactggcatgagcccgggaggcggagcttgcagtgagccaagatcgcaccactgcactccagcctgggcgacagagcgagactccgtctcaaaaaaaaaaaaaaaaaagacttaagtacactgcctgctccataaaatgcgctcactaatgtaacctctcattattatttggtgaattctaaagaaagaaaaacaagtttaaaatcaagtataggatgggtgagatggctcatgcctgtaaacctagcactttgggaggctgaggcaggtggatcacttgagcccaggagtttgagcccagccagggcaatacagggagacccccgtctctaccaaaaaaaaaaaaaaaaaaaaaaaataagccaggcatggtggcacacacctgtagtcccagctactcaggaggctgaggtgagaggatctcctgaaaccagaaggcagaggctgcagggagctgagactgcaccactgcacaccagcctgggcaacaaagtgaggccctatttcaaaataataaaaataaaaataaaatgaaatatttaaaagatatttaattataaactttaattttaaaaagaaaatttaagagttcaacgttaagaataatttttaattaatgttccaattcaaagaacagagaaacagaacagtcaaacctttgaacttcacttccattgaaataaaaaaatccataatctagaaacttctggacttgaggtttaagaacactatgtaatttttctgcctttcctcccttaaccatttgatgatagtcaaaattcaccatctggatatcagcagcatgttcagaagctttcaaatgactctgaaagtaaaaaggcaaatattcatctaaatgaaagtaaaaaggcaaatatccatctaaatattcatcacatttcattgacactggcaataaatcttttccctaaagcctcaaaaactatccctgagagatacggtgacacaattaacatcagtgtacttaaataatattctcatctggcttaggaaataaaaaattatttccaattgccagcattttatttttacaacacaaacttactatttagacctattatagaatctcaaagtcatctaagacaaagcctatcaaagactgaaagattcatattttataacttcattcaatacatacaaatattcttaaattttaccataaagtcactctgtaaagtataatctgtttattaacaatatttatttcaccagattaaaaaaatagctataaaatcaggatgcttttggacttaggagattgaactttagaaaatgttttctaacaatcttgtttaagtttataatcttatgtaacaacataatttatattaattcattattaattcaataagtgttcattaaaatattttttctttagaagtcaggcaattttggggttctttttgacatgaaattctcaagttttctctcatcagtacaagaaggtatagcgttgcatgtatataaatgcatcattcacaattccataggtgaaaaacaatgactatggttctaggaagcaggcaaagcaatcaacagatgaagaaggaaactgctatttctctactagtgacagataaacatttttggcaaggagggtatttttctgtttctctacaaaataaaaaagcagattagaaaacagtgtcatttgcattgaaagctttttagaatcccaatttcagcaacattagcctaaattgtttcttaatagacccaaagagttcaagtttccaacaagtacccaacctttttcttggaagtaatttacttcctggaagaatctgattactgtattattttattttttaataccattctaggtgtccatgggccagaatgaaataagaaatgaccatacttacctggaaagctttacttagcatatgttcaccttccttagatccaagcaaatttactattatttgtttaccatataagttcttaagtgttctaaaatgcctatttaagaaagaaaggaaataaatacatgtcaaataagaagcccaattttttcaataaacaataatccattattaaatataacttacatggcagtattttaaacacagaattggaaaactgggtgcgaattcattgtacatggtctcaaagccgaatttacgaaaactcatgaatgcaacttcctctctgacttatgggtactgagacttccacccctgttggagctgtggaggcatccagcttctgcccactctgtgaggctggcaccagacaagacagacaccagccataagcttgactggaaaggcagtaagggcagatggcaaagggctgctgctcacatgtgaggacatcacctactccgttgagtattcagagggacctccttactagctccagtcttcagaaaaatgggccccaaatacgagtcttttctctttccagcttctaaccattccagaaactatgtagagcaatgccacacaaagaaatgtaacataaaccacacctataatgttaaattttcaagaaggtgcatttataaacatgaaattaattatactttctttaactcaacatgtctaaaatatcatttcaacatgtaatcaatataaaacaactacagttaacctttcaacaacacaggtttgaactgtgcaagtccacttatatatggatttttttcaaccaaagaagaatcaaaactacagtattcctggcatgcaaaacccatgaatatgaatgatgacttttcataagcatgggttccacatggccgactgtgggacttgagtatgcacagattttggtatgtgagggtagaaccaatactctgagtataccgaacatgattttactaatgagataccttacattcttttttattttttaaggcagtctttgaaatctagtgtgcattttatacttgcagcacatctcaactgagactagtcacatttcaagtgcccagtagctacatgtggctagtggctgctatactggacaatgcgcccacagaggaagttttaaggtcaagagatcaagacccacacttccagcactaccacccccagaagtcgtaacactaggtgtcactgtctttcaattaaattaggagtcagaggaattttatttaaagccaaaaaagtttgaagtgaatcagtaaatacaagcagtcccactgcttagcaatatcaaaacttaaagcactatgtaaaaattgtcttacctgtcaaaagcaggtgcattggcttcaaatccccttgacatacggacacgatgagatcccaccttagacaagaaaaatatatttaatcaaaccaaaaaccaacatatagacgaaagaaatatcactgcttacaatatctaacaatttctttgctgaacacacagtcgttaatcaaataactgatttccattcatgatatgcttttaaaaaaacaagttccagggaatttccaccctccacctttatttttaaaaaaccaacctcatcaaaaaaagaagttacatcattatgaaatactcgtaaactagtaggaatttttattgatgaaaactatttttaaaggtgttttcatatatggtactttgttttaagttcaaactacatgccctgtgtaacagatactattaccatttgggtaattaaaaaaaccaaaataccaacaggtaaaataacttgctatctgagatcaacataaccaattccaaaagagattcagatgagactttatgtctctgacctaaattcctactcctccaagctgcctaccaatacaaatgtctatgtgttttcttctctactatgttgaatattctattcacaccaaagttccaccaaattgagaatatcattccttcctggaaaagcagactttccaagtcaaccttgccatcacccaattatagtatttgcacattttgcagaatcaggaattttgggttaagcaaattaaacaagatggaaaatatctacctattgtatattgttataatttttcttttcttacacaggagaatagcagagagatgaggcataattgagaaagatataacatgccaagaagaaatatataggtgagaccagattatttccctgaacttcaatttaaacatttctctctgagacgttggaatgaaggttgcccaatcacaacaaggatcactgagggggggcaaaaaagttgcccaaaattcattcttgctaacctgtgaacaaagtgcttttttttgtgggggacggagtctcactctgttgccaggctggagtgcattggcgtgatctcggctcactgcaacctctgcctcccgggttcaggcgattctcctgcctcagcctcccgagtggctgggactacaggcgcccgccaccacgcccagctaatttttgtatttttagtagagacagggtttcgccatgttggccaggatggtctcaatctcttgaccttgtgatctgcccgcctcagcctcccaaagtgctgggattacaggcatgagccaccgcgccccgcgcaaagtgcttttaaagagggtgtaaaaggggggttgtcaaatcagtcatgtaattggacaagtaaaaccagaaaataaactctaatatgctcatccaattccaaaactgaattaacagtacagtattatcattcattaagcattatccctcactgcactaagtcagataatctaatgagtattctgataaccaggggattctctctttaatttttaaataagaaatcaattagcctaatgtcacatctgtgttcaatttcattttatggtacttaataatattcataaaagtttaaaatttgaaagacgtatgtcccaggacattaagcattttagactgcagaaaactcacaagttgatactttttctttggagtaatcccagattaattgcctatcactccatacaagttcaaaacttagcatttttgtttactgattaacatttattttgcatagtactgcaacggtgcataaggtgaaaaaaatccagttttcatgtcttccaggtaatgcctatggttgttttccaccactctgttccccaacacatatatacattcagctatgtatcacagctctcatagcaatatactggctagactagattagatttctgtttttgtgttattagagacagggtctcactctgtaaccatgctggaatgcagtggtgcaaccatagctcactgcagcctcgacctcctgggctcaagggatcctcccacctcagcctgctgagtagctgagactacaggcacacgtcaccatgcccgaatgatttttatttttttatttttttgtagaaatatgggtctatgttgcccaggatggtcttgaactcctggtctcaagtaatcctcccatcatggcctcctagactaggttttattactcaatgttgaaagaaaagttttacaataacagagctattgccaatcgtgataaaagtagcactccagaaagtgttaaggctttaaataaccataactttacccaattaaaaaaaagttgcggccaggtgtggtggctcatgcctgtaatcccagtacttggggaggccgaggcagctggatcacctgaggtcaggagttcgagaccagcggatcacctgaggtcaggagtttgagaccggcctgaccaacatggtgaaaccttgtctctactaaaatacaaaaattagctgggcatggtggcacatgcctgtaatcccagctactcgggatgctgaggtaggagaatcacttgaagccgggaggcggaggttgcggtgagccaagactgtgccattgcactccaatgggcaacaagagctaaattccaacttgggggaaaaaaaaagcttgcattaaaggtatttttaaaaatcatttaattgtgtggtatggtatatcattttccatcaatattacttctttaccttcacatatttctgaaatttcaaccaaaaattgggggtagaccttacaatgtttaccattttttgactgattgatacggtttggatctgtgtaccccctaaatctcattctgaattgtaacccccaaggttgaaggtggggtctggtgggaggtgactgaatcatgggggtggagttctcatgaatggtttggcactatgcccccttgtattgttctcatactagtgagtgagttctcatgagatctggttacttaaaagtgtgtagcacctcgctcttatctttcttttgctcctgctcccaccatgtgagactcctcgctccccttttgccttttgccatgactggaagcttcctgaagcctccccagaagcagatgctgccattcttcctgtacaacctgcagaaccataagccaattaaacttctttcttcataaattactcagacttgggtatttctttacagcaatgtgagaatggactaataaactgatatatactgtaaatgtagtataataatatatgatctgagtattataagttataaatgctaaacaacttcagggaaaggaaatcataagtaaaaggaaaatcacaagtcaaaggaaatcataagtaagttgccagcactaaaaatgtcattcttacttgtgtaacaccttatgacaattcttataatgcctcaaacaaattcatcttggtatttatcttttccataaaaggcctgagtgcccaaatggcaacctctctatgaagcatcattatatctttgaatctctcatagcacctagcataaaataacatacacaggaagaactcaagtatttagtgaagagatctgagtggccactgaaggacaataaatcttaattttggaagtagaggattcctgctagaaaactgcaaggcctgaagttggacaggctgagtaaaccagatcataaggacataggtgcctagtaaatctgacacgcataacatatatatcaaaaataagaagacctgtcggagctagtaggaagcagggcctagagggacaagacagaaaactgtgagaatcttccaggctagaagaaattatgaaaaccttaactcagaggatagtagtgggaataaaaagaaagtcctactgcctagaacaatgctgagactaatggtaacagggctacttttcacttggtcaggactggctgcttcatagccattagagtaggatcttataaaatagaagttcttgactttgagtggtagagaacttggttaaaaatgaggattcctggccgggcacggtggctcatgcctgtaatcccagtcctttgggaggccaaggcaggtggatcacctgagatcaggagtgcaagaccagtctggtcaatatggtgaaaccccatttctactaaaaataaaaaaattagccaagtgtggtggcacgcgcctatagtcccagctctcgggaggctgaggtaggagaattgcttgaccctgggaggcggaggttgcagtaagctgagatcgcaccactgcactccagcctgggcgacagagcatcattccgtgccaaaaaaaaaatccataattttccacctatcaccacataacattagccaaccagaccgtataggaaggaaagcacacaggagaaggaaggcacaaggaagtcccactcaaggaagatccctcagtgtaactactcaggacgcaaccttattggatcatcaaaacactgtaattcagaacttattaaaataacacaggccaagtacagtggctcaggcctgtaatcctagcattttgggaggccaaggcaggagaactgtttgcccaggagttcaagaccatcctgggcaacaaggtgggaccctgtctctacaaaaaatagtggtatgtgcctgtagtcccagctacctggcaggctgaggtgggaggatcacttgagcctgggagatcgaggctgcagtgagccatgattgcaccagtgcactcaagcctgggtggcagagtgagaccctgtctcaaataaataaatatataaataaataaatataaataaattaaacaaagaaataaaataacataaaaacagtgtaccatagggctcataaactggttattagaatctctaacactagcctgtccctaaaacaaaagcattcacctcgcatcacatcagggtttcagcaatgttcttaaagcaaatactccaaacacccactgttgatcatgaaagcgtaggagaagtggggttctgttggcattctctcctaagggaaatttagggaaagatatatctatttacgttatccctacaaagataaaacaagtcaaatcgtcttgacaagaattcaagaatttttgcagagcagtagaagtgttaatccttgttaactcttagactgtcttaaataaaatgttactaaaaaggttcaagtagtctgtaatttttctctgcaataaccagtctaagatgtaagagatccagcagtcaaataaaggaagaaagatttttttttctttcccttttctcaatactataggctgaagcaccaaacttactagactatacatacccagatcctaaagtaaatatgatatacttcaaggactaataaattttgaataaaaataaaatgtcaacaatagttaacccttacatggtgctgactgggggccaggtgctattctaagtgcttttaatttaatccttacaacaaccctataaagtaggtactattaatattattcccattatacagataaggaaactgagacacacaagggttaaattatttgcccaagatcacacagctagtagtggtagagtaaagatcccaattaagaagtctggttcccaaggctttgttttatctactacattcttctgcctaaagagactaaatcattatatactaagataagaaggtaataaatatggaatcacattgcaaatcaatacactataaagacttcaaaatttttaacactaaatacagcagctcaatttcaatggctatttgaaagagcattaaaagaaaaaatatctaagataattccagaaactctgtactcgtctagacccttatttgcaaatccagctaacattattagatggaataatggaaccatcaatgaattaattaataaactatccagaaagtttagaaaatatgaaaattgttcaaaaaacaaaaataactgaatgtcaaacacatacttgcaaccctggttgctcccagaacaatggaacagatcctcggatttgtatgaaggaagaaactgagtcatctaagtacacaacctacagaaaaaaaaataatatgtaaactatttccacagaaaagttgttacacttacattagaaaaacaaatttactaaaatctattgcatactagttacattttatgatctaactctcatatacaattgtccaaaacaggccactatacaggtttgacttttttttctgttagcgatattaaccaaaaaaattagtaaaattataagcataagattcacaactttaaaaaataaattccttttaaatcttaatattttacatacatatctttatatttcattttgtttagctctttataacctaatttgaagatctgtgttgggctgggttcatggcctgaatttataatcatatagtttcatagccaaaaatatcataatttctgatttttagatggtacacatatttgccattaagagctgggtttaatttcacttcacaaaaaaacaagttgtctaactctacagctgaggattttaaaattcattaaaattcaataccaaaacacacaacactgactatgtcatgctgattagtgacatcttcttacctagatgaagagccacaccaaaataagttttttttagggaagcctttttttaaggcccataagtaaccaagaacaatcataaaacattatagatgttaaaataagctccgaatcaaataaaaatctgttattctagtattttctgtgcttctcctataataaattaattaagtaatataaaacactatatatacctgttctgtttctacaaaattggcaacatgaccatcatcatttgttccccggacattaaacctggtcccagctcgttcacagcttaatcttgaaatgaggcaagccttcgcctgtttatgagcagcataaattgttctgatttctactcctccacacataagacgtaataaccagtcatcacaattcacgccatagtgtttgagatgcaaatgcaaagactgattcctaataggaaaagaaataaatgattagcttatggaatactaagtaacaaagtatgacttttaaaataatctcctggaaaattaatttaatattattaaatttaaaggcacaaacaacaaatcaattcatttacatttactatgctagggatcagaagatagggctataaaacgagatccttcaacatgtgatctatgatccacagaaaaggagtatttttgtgtttttagtatctgtggcccatttctgttatgtctttatatataatgtgtttataacctaacttgttccaaaaaggaatacatatgcatgtccccaccccaatttatgaagctctactttttaaaaaaatatttatttatttatttatttatttatttatttatttatttatttttgagatggagtctcggaatgttgcccaggctggagtgcagtggcattatctcgtctcactgcaacctctgtctcccaggttcaagcgattcttctgcctcagcctcccacgtagctgggattacaggcatgcaccaccaagccgggctaattttttgttttgttttgtttttttttttcttttttgagacggagtctcgctctgtcgcccaggttggagtgcagtggcgggatcttggctcactgcaagctctgcctcccagttttatgtcattctcctgcctcagcctcctgagtagctgggaccacaggcgcccaccaccatgcttggctaattttttgtatttttggtagagacggggtttccccgtgttagtgttagccaggatggtcctgaactcctgaccttgtgatccacctgcctcggcctcccaaagtgctgggattacaggcgtgagccaccgcgcccgcccatgaagctctacttttaaggcttgacttttataaggctctattttaattaatttaaatttaaatagcaagatgtggctagtggctaccacattagatagtgcaggcatagggtttatcatcgctccaaatacttttagcattctaggtaacagatgtggcctggtttccaaacttttttcagagaaacaaattttattcaaacaaacatgcagaagcccaatgattatgatacagataaaagctgctatggctaaagtggggattgggactgaactttgctgggttggccttctcaccctgattacccctcagggatctctcctggaaccttagacctccacagaacatataaagaagctactaacaatataccactaaggaaaatacattgttaagtggaaaaactctatcaatttgaaaatgagttttctatattattgaagcttgactctttaggttttaagtggaattcttctacttaagtgctccgtactctctctctcttcctgtcttaaataaggtataaaagatgtaatagcattatcttgaagactcacagcaatagccccaactccctgccagcccctcagattacaggctgcaacagagataaaaagggtggtcagcagttctggaaaaccagctatgaccccaacccctcttatccatccaggaaatcacacgggaatataaatgagtgatgatattacaacagggataatgttaaatctgatgaccattacttattttaaaaatacactgacttaaacttccatactttactattacccacattgatctgaggcaaagttcaaactggttgtgacccagtatgtccaaccaccacagctgagacctacgccacagcaaagttataagaaacttacttgtcctcatttaaatagaccttaaatcctatgcattttgtgcaggcagagtttctctctctgctgtcagttttcatttttctttgctgtcagtgtgtcactgttttagcatttaaatttatacatgacttttgactggcagcagcttagaatttccaatggagtaaagctatctgggctttgtcacaggtatctgccactctttggctacaaaaattacatggttgtatcctggaaaatattgctactaagtgcaagggtatgcacaatgaattccaaaagttcccgtttttctatataaactgaagctcaagaatgccaatccttagcaaaattgtaaaatgagcaaaattcacctttggtgctctagctgtccctttgttcaacctgtctcctgctggacaaatctcaggctttcttttatctgactttgcccccatctctactcttaagtgaattaaaaaaaaaaaaaaaggaggccaagtacggtggctcatgcctataatcctagcactttgggaggctaaggtgggggggatcacttgaggtcaggagttggagaccagcctggccaacgtggtgaaaccccatccttattaaaaacacaaaaatattagcctgcgtggtggcgcacgcctgtggtcccagctacccaggaggctgaggcaggagaattgcttgaacccaggaggtgaaggttgcagtgagccaagatcgcgccactgcgctccagcctgggcgacagagtgacactcaaaaaaatcaatcaaccaaccatccaattaatcatgcctattgattaaacctaggcaatatatctgcatctgcttggacttctaattgttgtatgaaagcttttatctctcaatctaagaaactttgggtaaaaatgaggagggaaaaaaatgtaaggacagctgcaacacatttaccttttcaagggacttcaacatcttctactagaaaaaatgtagtgttggcatggttttaactcttggaagcctatttctcaatgcttcacaaaagtacatcccatcactgctagcttctttgggcaggcaggaactcatgtccattcatctgccctgttagtccctgcatcccctctctcctttcctctccctcatggtctcctcctctgctaaacccaagtctctaacacataatgctataaaccctgtttttattctgtccactcttctccctgatgccaccactctgggtcaaaacacttccatgtgagctacaacgtgaccaagctgttgctctaaagttaagtttcttatcctaagtttgttgttgactttgagtcttctgacagctagggcaaatgggtgacacccgaatgtgctactcaaggactatataagtgacagtgaaagtgtgagagagaaaaagtacacaagaggaaaccatcttgaatctgaactgttaagggaggccaagagcaaagagtcctgaactttggccttataacatatgtcaatataataatacataatttgcacatgatatcaagagaaaaagtcaacatcaatgctggctgtaaacaacagaaccactatactagaaatctggtctgctgcaatagaacaatgctaattatagtcccatgtgttctgctcaccatttgtgcctacttagaatacagcacagttatgcataatcatgaaatacatcacacttacctacataagtcctaacttattatagtactagattttgtcccagtatactacttcttcacaatctgttgctcttgaatcaagaccacctacttataaccttaaaatttagaataataagggaatgttggcttagaaagggaatgccgccagagacaagatctcaaaaccaagaataggaaacgtgagtaacacagttttgttacaattaaattcatttctaaatatacacaactattttaaatgtattttggaaatgaaagttcagtgtagactggggggagcacaggggttttatgtcacatgccaacttcaataaaccgacattggctgcctgccatgctctgctgaggactccagagaaggaaagatggatacactcaattagcaatgtctatcccttgttatctctagacataacaactgctgaactttttttctttgtaaagcaagcaaaagttttattgaggaagtacaagtacactccaagaaaggagtgggctgaccctgctggaaacacccccaagacattctgcattgtgatcttctattgtctcagttctttctttacccagttctcaccaaggtttgggggatcctcccttactgtgcttaatgcacatgcacgggaaccagtgatcaatatgaatcctatctaatggtggcactgcttattaccaccaccccaggaaggtatagccatcaattttgtactcattatgcctgctcagctctcaggaattcccctttgcctttttccttccttatcaggatctacttaacaacattctgacagttcgaccacggagtgagtactgagcatcctaagaggagttccggggcattctttccaacacgtataccaccccctcgtgcctgctcatatctgactgtctactcttacattgctccctcaaggcgttgggacccagaaatcttttgggagatgaggtagaggtcattctctgtagctacttgctgctgaaaaggggcatcgagggtcttcagggttcttcctcctttcttgctgtcacggtgaggaggtttttgatgactgaacaactgctgaacatattatgtcccaaatcaccaaaagggaaaaaatgaactcaccagaaaaatctattatcagttgtctgttcttgcatgctacgatgcgcattaagactcaaatctaaactgatgccagatgcagaccatgcaaaataaaagtttcctgaattcaaaactttccgcacttctgaaatgcgatcctcatctgaagaatcgattcgcagtgatataaactcagtggaagtaactcggaaaacttcagattcttgaatttttccaacagacatacatccagtgactaggaccagataatgtaacatagtatcacctgcaaaacccaaagattttactggatgaaaaatcccaacattttcaagctattccatttcttcttgcacctctattttttaaatctgacattgtgattattttaaacttatcatggatgtgttgaaattcactagacattttagttgaaaaaaatccttgtttaaatatattaagtataataaagcatttaaacattaacaggataatctcacacgaaattgttcctgaacttattctgaggctaaaaaaactttatcgaataattggctgggtgcggtggctcacgcctgtaatcccagcactttgggaggctgaggcaggtggatcacctgaggccgggaattaaagaccaccctgactaacatggagaaaccccatctctactaaaaatacaaaaactagctgggcgtggtggtgcatgcctgtgatcccagctactcaggaggctgaggcaggagaatcacttgaacctggaaggtggagtctgcagtgagccaagatcacaccattgcactccagcctgggcaacaggagctaaaactacgtctcaaaaaaaaccacacgaacaaacaaacaagaaaaaaactttatcaaataaaaaagtatgtgttaccttctctacttttgcttaatgattgtcagaaaattcaggtaagataatgaattcacactcattttaacaagttctttgtaaatagtaaagttgaaaaaatggtatactattatcagctgatgatgttgatgacaaatggacaaaagtctctggtaacaacttataaagcaatttggtttacaaaaactttcacagagatttttttcatgtaattatgacaaaaagcctatgaaattagtataaagttgaaattgagcaatggtatactgtgagcatgggctctgacacaggtagaagcggccctgaatcttggctccattacttattacctggaccaatttcagtatgtagcataacgaacctgagatatcatctcttataaaaagagattaaagcaaatacctcattatactgtgaggcttacccaggagtaatcagtaaagcacctaagcgcagtgctttatatgtgatagattcataacaaatgacaaatctccattttatagaccagtgctactcaaagtatggtccatgaactgttaccagctcacaatgagaaaggacacttacaccagaatggaaatcaactatattactaagttcaccctttagttgagctgacttttttttctagtaagactttatcaatgaaggaagccacatgttgatttgtatcatagtgcaagctccttatcttatcacggatcaataacaaaatgatttatggaccagtaccaatgttgaagaacactttgagctgcaaaattacagataaactagtaactgcaaaggttactctgcagctcacggtgacattacgtggcaaaaaaaaaaaaaaggctcaagcagacactttctgaattcaaaacagatgtcttttccaatacaaaccaagaaaaatcagtgtagttctcatgcagacactttttcctaaatgcactgaatcaacaaaaaggagaatgttctgattttctcttttgacaactgatacttatctcttcaagtggtcaaaccagagactgtctccgaacttccactcacatgagtttgagcatgtagcacgcctttttgggcaacaaacattatcacaatattagctacattaatgtttaaaagatgttagcacatgtgtagcttaaatatggagtctacaataattcatagctagtccctctcaaatccttagaattacaaaatagaaatgaaaaaatggatgaattctactgaatgataaacttaccaagatttaaccgcagaacacctaagagtccatatgcatccagtactttggagtatgtacccttgattgcctctttttctgcagatgctacaaaaaaaagttttagtttaagaaaaatgacctgaaacattggattctatttagctaagtataaatccagagtttcaatcaaaagtttctaaatctgatattcttaaaataaatgtactgcatattttcttaaactagtaacattagtattcttcccaaagagttaataaattattccaagaccatctattaattaatccatcctgtccactgatctgaactctgtcttcttacccttttattcttgacagaatagtgctcgacacttagaaactgacaaaacatttaaatgataaaagctaatggcaacacttgactacacaaatgtagggcaagaatagggaaatctgattctgaaaggacaaaagtctggtctttgccttgatttatttcttctgctataaagttaacgttaccttgttaatgaatataaaccacagaataattttcctaagacaggctattatgattattctattgagaagaaaaaacaacaaaaaaaaatcaaatcctgaaacgttaaagaaaaaaccttcctagcacttagcaattacacattaaaaatttcacaaagaaccaaagaaatattaacaaccagtatttcaaaggacaaatacaaataatacatcccacagtctacagttgatccttgagaaagataccttcctttccttccaggtttctttccttctttgcttttttcccttttccattatctacaccacactcaactcacctcctggctgactggttcataccttatttacttcttatctcttacacttatcccctttcctttatctacaaaataggatgtttggcaacactgacgtgttccacgttagaaaatcacgtaagtagatacttatgactgtctcatttcctgtccatctttattgccaacaaaagggctcttctcagcctactgctttgcctaatactcctttgtactttgcattagagatcttctactttgcctgaagctcttctccagagtcctatagaacatctcactttccctgcctgcttcacctcttttcagaccacgtaggcttaagccttcttcctagtgatctggcttctgccttctgatgagttttgctctgctagttgcagcacaggctaagactaactgactcagtcactcaattagctgatattttcacgattctctaacatgttcattattaagtgtgggccattatcaaaccacccagtatgaaattagggagtggagattcgccaacccgttaaagtgatggggatttatatttcattctgtattccttgagttcctattattattacatcttatgtttatccaacagttgatcctaacattccatgacaagcaacccaaatgtaaaacattacaatataaactttaattacattttataaagcaaaatagaattgccttctaaatactgcctcgttaagagtaccatatgtactgtaaacattagagagacttgttatacctctcaggacagaaggcatgacttccaggataaatattattctagaggtttacaagttatatgccatatacatttaaaatacaatcactaatatagtaatatagaaagtactagatatatccatttcagcagcaatcatcatttgggttcaaatgccaggaggcagtaggagttaagaagaaaatatagttttatttttatttttattttttttttttgagacagaggctggagttcagtgacacaatcacagctcaatgcagccttgacctccagggctcaagtaatcctcccacctcagcctcccaaggagctgggactacaggcatgtgccactatgtccagctaattttttttattttttatttttgtagagatacagtttctctacgttgcccaggctggttggaaactctcgggctcaagcaatcctcctgtctgagcctctcgaagtgctaggattacaggcatgggcaaaaaacatattcttaacattaagtcaccaccttcctttagaaaacagagaagtcattctataacttaaattaccatgtaacaaaatgttctctcttctaataatgcataataactatcttctcattaattacactccaaatacataaacgtatgtctctcaggactgatgaaggcccatctattagactatcatctaattcaaacatgcaaacaaatgccttgcagtttagttatttacatgtttgtattctattcggacactcaggaaacaggatacacacacacccacacacacaccttaaagtgcatactcttagagccaaaggtacttttaactccagacactccaaatttcttaagagaaaacagtatcttcttcataaatacatttgtatctgaaggacagtagatgtttccctactttacgatatatgcttcaaaggttttgagtagactggagggaggcccagtaatggccactaggagaaggatggcctgtgcaagaagctgaagctagaggcaggggaaaagggcgtccacttgtgggaggggccgcctggcatgagttcctgaagtctgactagggtgaggagaggactgtccacccatgggtgttaggggcaccccggcatggtaagttagagcttgagagggatgggaaaggcagggttttgaagtgccagtggggtaaggagggcacctatgcagtggaggaggctacactggcaataggagagtggttatctatggggtatgatcaaggataatgagagccaggtttctcactgtcagagaaggtactcacaaatgcaaacagagaaactagaatggacagtgttgattagaattggagttaccaggccgggtatggtggctcacgtctgtaatcccagcactttgggaggcccaggtgggcggattatgaggtcaagagattgagaccatcctggccaacatggtgaaaccctgtctctacgaaaaacacaaaaaattagccaggtgtggtggcaggcacatgtagtcccagctactcgggaagttgaggcaggagaatcacttgaacctgggaggcgtaggttgcagtaaaccgagattgcaccactgcactccagcctggtgacagagtgagactctgtctcaaaaaaaaaaaaaaagaattggagttaccagtgttttctagatagactaaagacagacaaaaagatagaaacacagatataagtatatatgtcatatacatatatagttacatatactccttagcactagccactgagcagacccaggatctacaatactctgacagcaatgcgcatacctagcatactttggcttctacataccattctccactaaaaggaactactagcattccttggagaaatggttgattccagggcaaaggcagggacaaaatgagcctaaaacatagtattgtgccaaaaagtaagcaagtgttcaaaggataattgagatatgtcacaaacatgcagaaggcagcttgaaggggcttctactggtgaaatccaggacaatttgagcatcaaaataaataataagagtaatgggttataagcctatgaattgaaagtctcatgaggaatgggcaaaacaattataaagggaaaaaaagtcttcccgacatgcctagcaaaccatcacctttatcaagtaatcaaagtgaacaccaacaggggcctggcacagtggctcacgcctgtaatcccagcacttcgggaagctgatgcagaaggaccccttgaacccaggagttcgagaccagcctgggcaacgtggcgagaccctgtctctacaaaaaaatataaaaattatccaggtgtggtggcatgcacctggggtcccaactactcaggaggctgtggcgggaaggttgattgagcctgggaagtcaaggctgcagtgagctgagatcatgccactgtactccagcctggccgacagagtgaaaccctgtctcaacaacaacagcaaaccaaagtgaacaccaacagtaagaggacaagtcaaaactgcgagccacttgtcaagacactatgaaaaaagcaccattgctgcaatactcctgccagaggtgaataacctgaatctacgcatgagccatcagacagacccaaagtgagggagaatctacaaagtaactggttttcactttcaacatttttaaggccacaaatgtcacagatcgagaaatttttccatttaaggagactaaagagacatgacaacaaaataaaatgtacacatctgaactggatccttttgctataaaagacattgttggggcaattggtaaaaattgaagagaggataaggattagatagccataatacatcactgttaattttatgatagttttacaagagaatgtctttctaggaaatacatagcaaagtatttgggggtgatgggtcatcatgtcagcaacctattcttaaaaagtccagagaatccactcagttctggggcaaaaaaaaaaaaaaagaagtccagaggaaaaaaagttatttgtactatacttcaacctttctttatgttttaaattgctgcaaaattaaaattttttcaatgtaaccagcaaaaataatttttaaaaatacatatacttattcccagataaagaagcttttatctctgacgttaataaggtaaactcttctaaataccttgttattccctccctgtacatttttttaatggggaaaaaagatttccttattttatgagactccataaacttcacaaaaatacatgatggaagggggatgaacctaattaaatttctgccccacttctctgataatttaattccagaaaattattttagaatcttctactataaagagattatttaaaataagaaaggctatatacaacattacataaaataatatgtataatctttagataaaatacagcacttggaaatattttacaatcatcaccatcattctttttcccttaataatctcccttgcatcccatgcttcagccaaaatgaataattttgttgcccacatgttccacattctcttccctttctcccttttttcatactgttgtttcatctggaccaacctttaatcatctttgtgtttccaaatattacctatccttcagttccaaattaaaacaccacttcccttcccaaagattttccctgatcactctagctggaggtaaatctttctcctattttatactatagttacatgtaaactagtaacaacagaaactaagtcttatttctttttcctttttttttttttttttttttgagacaggatctcactctatcacccaccctggagtacagtggcacaatcatgactcactgtaacctcaagctcctgggctcaagtgatcctcctgcctcagcctccttcctgagtagctaggactacaggcactaatactacaggactactactgagtagtattaggactacaggtacgtgccaccatacctggttaatttttattttttgtagagacagggtctttctatgttgcccaggctggtctgaaacttctggcttcaagtgatcctcctgccttggcctcgcaaagtactgggattacaggcatgagcaactgcacctagcctcatttccttatatctcaacacaatacctaacctaacacagagactctgaatggaacactgcaattgctgattaaatgttcatctaatagacaaaaacaaatggaaaggttgtgcattaaagaacatgttttgctaatttaaaaataatatataaagtggatcacctgaggttgggagatcgaaaccagcctggccatcatggtgaaaccccgtctctattaaaaatacaaaaattaggtgggcgtgatgatgcatgtctgtaatcccagctacttgggaggctgaggcaggagaactgcttgagcctgggaggcggaggttgcagtgagccaagatgtgccaccgcactccagcctgggtgacacagtgagactccgtctcaaaaaagaggtaaaacattttactttatcattgaaagtatttgaatgccctcattactgagattcacattcaacaactcctcagttacgtctggaaactttcaaatgtgtatgcctgtggcagggagtagtaaggtgggggtgggaaatataggcattgttaaatggttgctaactagggtttaaaatactgaagtttatgaagtggcagggtgtgtggggagctcagaggaaacaaactgaaagaatgagcggaaatgaaagttcggaagataccgtgttagggaggaagttcaggtcactttcctgctagtgcagtctttcaaggcatccactgcactttcaacgaatggaataaactcccttttgtgaagaggtattttttttcccctcctattcatggtggttattaaacaaacgagatgctaggcaaaacaaacctttctttgtaagttactgatttctaaccataagtaggtaggaatgtcccagaagagaattgctttcggagtgattctgagcccatcaagatcgacagcagttcaggtgaggtaaggcggcctgcaccgcattagttcacatgctgaacacataagctaaagcaaattccaacttctaaagtttctgctataacacctcaggaataaatagtacctaactccctctatagcttattttaaaggaaaagactatttttcccatgtcatactcaacaccatctttcattcataccttttcttaggtaccttttttttttttcatttgataccagctctttattagaaaagaaaaacttctttgtgggcccaaaaagaatcattttgctgggtgtggtggctcacgcctgtaatcctaacactttaagaggccaagcaagtggattgcttgaacccaagagttcaacaccatcctaggcaagatagcaagaccccacctctaaaaaataaaaaataaaggtggaacaatatgtaacaggtgagggataaccaaaacttgccatataaagacaataagaagattttaacaattaacaagattcatttttcaatggcttgttaatcacagaacaattaaaaagctaaataaaaaccaatcttacttatgtattagaaatatatttcaattcacccatggatccaacacgcttttagacagtaaaatttttactgacttaagaaaaaacactgccggttgggcacagtggctcacacctataatcccagcactttgggaggcccaaggtgggtggctcactgaggtcaggagtttgaaaccagcatggtgaaaccctgtctctactaaaaatacaaaaattagcagggcgtggtggcgcacaactgtagtcccagctagtcaggaggctacggcaggagaatcacttgaagccggcaggcggaggtagtagtgagccaagatcacaccaccgcctttccaccctgggcgacacagcaagactctgtctcaaaaaaaaaaaaaaaaaaaaaaaagaaagagattttatggagtgtttttttttttttgagacagagtctcactcttgtcacctaggctagagtgcagtgacgcgatcttggctcactgtaaccttcgcctcctgggttcaagcaattctcctgcctcagcctctcgagtagctgggattacaggtgcccaccaacacgcccagctaatttttgtatttttagtagagatggggtttcaccattttggctaggctggtcttgaactcctgagctccggtgatcctcccaccttggcttcccaaagtgctgggattataggcgtaagccatggtgtccagccaaaaacactgcctattaaactcatgtacttatgttatgcttaaagagtattgacagaattctcactgccatgtgtttcatgtgaaagaaatggaaatcaggtggggtgtggtggctcatgcctgtaatcccagcactttgggaggccaaggtgggaggatcacttgaagtcaggagtttgagactagcctggccaacatggtaaaaaacccatctctactacaaaaaatacaaaaattagccgggcatggttgcagacacctgtaatcccagctacttggaaggctaaggcataaaagctcgaacccaggaggttgaggttgcagtgagccgagattacatcattgtactccagcctgagtgacagaacaagatgccttctcaaaataaataaataaaaacataaataaataaataaataaggagggagagatagtaggtagaaatatagaaaaacaaaagtgtccatgagttgatattatggaggctaggtgacatatgtaacagttacactatttctccaaataaaatgttaaaaaaattattacattctttgaactattggataaattcagaaaggagagagataactctggccaattatcttgagacagccagaagctactggaattctaagggatcagagaagaacttttctctaattaccctagaccaggagtgcattagccaaaagtttaacagacatttgaacttttttttttttcccaaacaggatctctcactctcacccaagcctgagtgcagtggcatgatcatagctcactgtaacctgaaacccctgggctcaagcgattctcccgcctcaacctcccaaagtgctgggattataagtgtgagccattgcacctgattgatttggacttttataaacttcaaagggacttgtaagtcctacaatctttagaatggccccatagcccacacttcccaaggctctcaaacactcatcaaatagtaaatatataataaattaagaaaggaaaagatttagtaattccagaatggaggccttaggaagggtaaatattgttataccctgccatcaatgttttccttatattcttcctaaataatttagttttaatattctaactgttgaaatggaaactatacttggaaaataataagtttgtttttgctcattatcacagaagttaggaaatatttaaaactatataaagccatgaggtagtaatatcctacaacttaattcagataactcaactccttccttattttagttttgtgcatgttttcaaacttcttttaactgaacaaattcatgcatgactgaagggagccccaacctacaacttttcctcgttaagctactggaaggtgacaaaaatagaaacggtagaggtggtctatttatagactacagaaaacactcagagtataaatatatcaattgttctctatcaaaatttaacatatcaattgtgctctatcatattatttgacatcctccacctttttcttttttctggagtgacttacttttttttttttttgagatggagtctcgttctgtcgccaggctggagtgcagtggtgtgatcttggctcactgcaacctccacctcctgtgttcaagcgattcttctgcctcagcctccagagtagctgggactacaggcgcgcgccaccatgcccagctaatttttgtatttttagtagaaacgggtttcaccatgttggccaggatggtctcgatctcttgacctcatgatctgcccacctcagcctcccagagtgctgggattacaggtgtgagccaccgcgcccagcaatgacttataatactatgtcatgtgacataactggcattattcagcattgttgtattacaacctcgtttctcaaattagaatttaaggcaaataatgaagtattaggatcaaatataaaaattcagatgaagacataatcatatacctatttcttgattttcatgagttgtggctctaaaagagaggcttgttaaacataacatagttgtcgcatgataatcacacctgcattgctaactccacatctgaacagaaaagaaacaaaattaacttcttatccaagagcaataggtaacttaaatgtcactttcattttactttaaaagtattttcaggattaaatttaaatgtaaatttctccaacttctgatggattataataatttaagctaaataataaagccatccaaatgaagggcctactatccaatgtcaacattctgctgtgggtcaaaccttgcagtctgagaatacactgttcttccccagctgatacagaagactaagctaaagaaggtcaataacaatgtaaaaataagactgcatgttagaatgatctctctagaaccacaatttgcctgtggttgcatgcactgcagtttgtggtgagcttatttgcatgcagacagcactttggtatagaaccagagaacctcctgtatgaggatcctagagatcatgtaatccaagcttctcattttcagaagaaaaagagtagagattagatcattcatccaagatcacataactagctggcagtaaagcttctttccatttcatcatatataaagagaaaaattattttaaaaggaaaaggtttctcttacaaaagtaattaaaattccagctgaaagatattaaactatctaaattaatgtcctatttaaacttcacattccaatcttggtgacatttaaggaaaaaaaaaaaactttcattcacgcaagaagtatttattgaatgcctaccatgcaccaggcccctggcaaggttctaggaataaaaacagtcagtaccgtgacaccttcttaggaatcagattaggaagacaggaattatataaccatacaaatgcaaaattataaattatagtaagtactataatggagttctaacagattacaatgggagaacctaattttaaattgtttgttggaggaggacaatgattagaataaacctcactgaggaagtgacctttatagtgagacaggaaggctagccaaataaacggtggagataaaaatgtttcaggcgacatacgtatatactgtgatccagcaattccattcctaagaatacagccaacagaaatgtgtacatatatgtaccaaaaaacatgtacaaggatgttcatacttgtgtcatttataatagcaaaattggaaataaagcaaatgtcaacaaaacagctaaatattttaatattcataaaatggactacactgcaacaaatatgagtaaactactgccacttgctacaacatggatgatttcccatatgtcaacatggatgatttcccatatgtcaacatggatgatttcccatatatcaacatggatgatttcccatatgtcaacatggatgatttcccatatgtcaacatggatgatttcccatatatcaacatggatgatttcccatatgtcaacatggatgatttcccatatatcaacatggatgatttcccatgtcaacatggatgatttcccatatgtcaacatggatgatttcccatatatcaacatggatgatttcccatatgtcaacatggatgatttcccatatgtcaacatggatgatttcccatatgtcaacatggatgatttcccatatgtcaacatggatgatttcccatatgtcaacatggatgatttcccatatatcaacatggatgatttcccatatatcaacatagatgatttcccatatgtcaacatggatgatttcccatatgtcaacatggatgatttcccatatgtcaacatggatgatttcccatatgtcaacatggatgatttcccatatatcaacatggatgatttcccatatatcaacatggatgatttcccatatatcaacatggatgatttcccatatatcaacatggatgatttcccatatgtcaacatggatgatttcccatatgtcaacatggatgatttcattgagtgaaaggagctagataccaaagaatacacagagaatgactccatttatgttaagctgaaaaacacttaaaactattccatgatgtaagaggtctgaatagtgattatctttgcagatcataataaagataactgggaaggagcatgaggggattattctctggaaagctctctggtatgctagtaataatattctatttctcaacccagttgtggtaataagggtatgttcattctataataatatatcaagctgtatgtttaagatttatatacttttctacatgtattataatttaaaaagcttattattttaaaaaaatacatttgagcagacggaacagcatatgtaaagaccctgacgccagaaagaatttggtacattcagaactgaaaggcggccaatgaggttagaacatagaaaccaagaggtaaagtggtaacaggttgaagagggaagcagaaactcgattttattgtaggtcatcttagagtttagattttaacttcagtggccaatcactgaagagtattaggcaggggattaataagatctaaaccatgttttttaaaagactggggtgtaggcgtggtaagtagaagcagagggaccagttaaggagggaattgtaatgatccatgaaagagacaacagtgtcttgattgaaacagagccagctaaatgcaggcagttgcatggaatctcaaggaaattaagaggaggaattgactagacttggtaatagagagaatgtgtgaaatgtgaggggaagaggtgttgaggatgattcttaagttgtttgaaacaacttggtagatggagtgcaatccattgacataagggagactgaaggaaagatcaggtttgaggatatgcagtggttggtaagaccatcaatacggtacctattccaactcttcctcatttggtagccaccaaacagtttgtgatactatggaaatcacagaaatttctaccttcttctgccaatgatctacctgatgcaaacagcacatgatatctcaacagtcatttttggttcaggaatacacaaacactcaatccggtgcaaggggaagtgcattttccttttgtgggttctaacccattatctgagtttcaaaaagctggatctcaattgtgtcatccaacataattattcaacccagctctcatcaatcctacgtcactttgccacaactaaaaatctgaaaactgtactttctactccattctctaagagaattgataaaactgggaacaagataggccaaagatatattcccaatgctaaccaaggaaagacaactaatgagcactaaggtacaaccagctagaaatttatttaattataagattctggaatttaaaaataaaaacaaaaagaggccgggcacggtggctcacgcctgtaaccccagcattttggggagctgaggcaggtggatcacttgatgtcaggagttcgagaccagcctggccagtaaggtgaaacctgtctctaataaagagatacaaaaatcagctgggcatggtggtgcacacccataatttcagctactcgggatgctgaggcaggagaatcacctgaacccaggaggctgaggttacagtgagccaagatcatgccactgcactccagcctgggcaacaaagtgagactctgtctcaaaaaaaaaaaaaattgaaaaaagaagattcattctacttatagttcacacatggtccacaggatattaaatgattttgtttatctatatttcagcaacacattcaagagattacagcaatcctatggtccactagtgaacagaatgaaacataactcataataaatatttattgctaagagctagttatataagtaaacacacctttatatataaaaagttaaataagactataatgaaatagaaacacaaaattttaataagtacatttaacatatagaaatatttaatgttttgagacaataaagtttttttttaatttttttcttttcactgactcagttggcccagaattatccaggaatttcaagggtctaaaattttttcattctgaactgaggaagtaatgagtatccaaccaagaagaatttatatatctctccaaatgccaaatttattttctccaagtgccaaatcattcatcatttggttcagtagctatgaaatgcaacccaatgtgaatgcatgtgctcacatacgtaacactactgatcagcaatggcttatatttataaactctatttaagctggaaaaagataaaatacaaattcttattaacaaccattaaaacactcaaagcaaattttaattgtcaccagtaaaaatcatgcacaatttttaaaactatacttccttttgatactctaacaaggctaaacaattgcactagcccattccactctttattgcttctttcactttgtatgcttctttcaaaatttcactgattcagactttataatctcaaaagttttgaaaatgttggtattggatactaagaaaggtaatactacaatattaaactgctagtcattataattagctcatattttttcaaccttcgaatgtctgaaaagtctttacatcttcatttgtggttgggtacaaaactctaggtgaatggtttggtttggtttcttccttccagtactttaaagatgttcccaatgtcctctggcttggattgcttgcaaagaaaagtctactatcattcttatcttcactcttctgtaaatgtgtgtcttttcttccttgggctacttttaagatcttctctgtatcactggtaaacagtaacttgatcatgtatttgggtatagtgttctgctttatgttcatttagcttcttggatatgtggattcatagctttcatgaaatttgcaaaagtgccagctattatttcttcaagtgtttttcttccctaccaacttctttctgggatccacatattcatgtatattgggtcaccggaagtcgtcctgcagttcactgatgctctgtgtatttatttattttagccttttttctctctgtattttattttggacagtttctattactatgtcttcaagtttgccaatcatttcttctacaatgtctaatatagtaatccctaccacatctagaagtctaatttgggtctttcactttttttttttttagagacggagtcttgctctgttgcccagactggaatgcaatggcatgctcttggctcactgcaacctccaactcctgggttcaagtaattctcctgcctcagcctctcgagtagctgggattacaggtgcctgccaccacgcccggctaattttgtatttttagtagagatgggatttcaccatgttggccaggctggtcttgaacacctgacctcaggtgatccgcccacctcggcctcccaaagtgctgggattaacagtgtaagccaccgtgcctggcctctttcacatttttcatatctcgtcttaacaggttcattttttcctctacttgttgaacatatggagtatatttacaatagctgttttaatgtccttgtctattacagcatctgtttctacatttgactttgctccttatgaggtatattttcctatattcctataaatattcttaaacttcgttctgggatacagttatttggaagttcggttacttggaaacagtggcatccctttgggtcttgcttttaagctttgttagggagggctggagtggaatttagtctaggactactttgcccctttactgaagcagtataccctttgcagtactcaacctaattctccatgcaggacttctccactctagttgttaaacatgaactattcccagccctgtgtgagctccagaaatttttctgcctactcctttttggtgattctttccctgcctcaaatggtttccttacacactggcaccgatcaacactgagctgaagtctcaaacggagtcctctacagatctctggagctctttgtgcaactgtctcatctctagtacacagccctgagattctggctgccttggcctccccatattccctactcaggaatcctgtcaagctttgcttgagtgactcttctgctgctgtggcctggaagctctccaggcagtaagctggagcattcataaaacccacctcatttgtttcccttctctcaggggtcagcatcttgtgctgccttttgttcaaggtctgcaaatcattccatgtattttgttcattttgttgttgttacttaaggtaggagggtaaatctagttcctgttactccactatggtcagaagctcccgttatagtcctgagttacgtatattttataggacaagttagaacatctgatagacctgagatgatgtaataaaaagccacagagtttttactattcagtgagagtggaagttctgcctttcctttttatttcctcatagcaaagttaagtggtgaagaaatgaaagcacttaagaactaactactggtttgaccctaggtcaatcctactaccaacccagaataaaaaagtttggttgattttctttttaaagagttgacatttaagttactttctattaaatacgtacattcctcagactacaggggcacataaaaaaagaaagaaaataaatatgcaccttccaaaggtatttataaaaagaaaatgaatttttgcaaccctaacataaagtgatatataacaagtctaaatttcatgatttctctgctgaaaaagtcaactataaaaagtcacttcttccctcaacttgcaaatttttctttaaaagagacaggacactgcaacttatctaaagggcaatcatgttgacagcgtttggcaattaaaaaaaaaaaacaaactacacacactgtttggcattaccacctactatatttatccaaaagtctagaacctgacatttaacttggcccaggaaagaaactttgtttttaatgactttactgtaaattaaaccatactttctcctctaatatattaatatgttaatagtttgtagggaaaaacacaagtgtacagttccctcattagaaaatgctaccaattacactcttaaccttaacgccttcccttatttttacacttcattccccacccctgaaaataatagccacacaatatatggtaatacaatagcctcacaacagcacaaacaataattacagtaaaaaaaaattaaatggtaggactatgtcattggggcagttatctttccaatcctcagtttccaaatctctgaaatgtggataaaagcacaatctgaactgaatgaaataaagtgtgtcaaatgccacatctcctgaactgtgtgctcagatgccccacggcactacagcaaactcccagggaagctgcatattttaaacagaaggaaacactgagattctcaacacatgctggaaaccagccaaactattaacctgaggtgcttgagttgtcatattagattgcagtgcattccttggatgatatatattagtgaaaccgggtttttgctggttgctgtgataaaagcaagtgtcacttgaaaatcaatgtggaacaggaaatgaggacggcagtgtactctgttccaaggtttgaaaagctatgcaggctgggagcagtggctcacgcccgtaatcccagcactttggaaggccatggtgggcagatcacctgaggtcaggagttcgagaccagcctggccaacatggtgaaaccccgtctctactaaaaatacaaacattagccaggtgtggtagcgggtgcctgcaatcccagctacttgagaggctgaggcaggagaattgcttgaacccgtaggcagaggttgcagtgagccgagaccgtgccattgcactccaacctgggtgacaagagtaaaactccatcttaaaaaaaaaaaaaaagaaagaaaaagaaaagctatttagtgctcagtgctcaacaagcacacacatctcattagtaaattgtggttacttatgaagaaaataaatgttctattttttctgcatttttttttttgaacagctacaaaagctgttgggacacaaatattttttggacctaactatttaataaacagaactattaagtattgtttgtggcctaggggtgttgtgaaaaacttaacgaggccaggcacagtggctcacacctgtaatcccaggactttggaaggccgaggtgggcagatcacctgaggtcaggagctcaagaccagcctgaccaacatggagaaaccccgtctctactaaaaatacaaaattagctgggcgtggtgccacatgcctgtaatcccagctacttgggaggctgaggcaggagaactgcttgaacccgggaggcagaggttgcagtgagccgagatcgcaccattgcactccagcttgggcaacaagagcgaaactctccctctcaaaaacaaaaacaaaaacaaaaacaacttaatgagataataaggtcaccataaaacaatgaagtttaaaaacctctggcttaatgttgtgactggcagaataagcttccagtaagtggtagccattatcatttcactacgattagtcctttacgcagttttatagaaaagagaggatatttcatattctgtaataaagatctcagaatatcatcctatagtattatgacttatattgagtattatatatagtattatgacttatgttgtaagaaaaaattaggtagacaaagaatctcataaggacaacttggaggaaaaccaggtgcagtgatatggccttgctatttataaaatgcatgatttgagtcctaatctgactcaaattatgctacttgaaaagcctgaaagtaatcttaccactagacagataaaagcaattcatccttactcccatgctagcatgtaatatggaaaagagcaaaagctttaattttaagagttaggaatccatggcgccacctcacctccccatcttttacgtagaggtccataacttctgtttttagagttatcctccatttcccatatgttgaccttttctttactccatcttctatttaggatataattatgaaatgaatcattcactttattgaagcctgagatgggctgtaaaatattgagattgtgaatttaatgcatgtatgtcagactgacagcttgtccttctcctgtgacagtctttgtgtatgtgtgtgtaaactggagaaagactaagaacaatgaattgtacacaaagctgagagacatcttttatctcttaataaattgtttccaggaaaaaaatatgtacctgtttataacttgctaaccatcacacaagctgcttaaactggtagatgcagcaaactagtcacagagctcacctgctacactgaaccactattccaaagacatcaaattgcaatttaatcaaacacttgctgtacaaatacttttcaaaactgagtaatgctaaaaatgggtacactcctaaaaaacatattaactgttatctaagggtaagaactttttagaaagtgttttaaataaatcaatgcaacagaagaaataataatgaaattattttctattttaaacaggtaattttgaaggccaggcgtggtggctcacgcctataatctcagcactttgggaagctgaggtgggtggatcacaaggtcaggagtttgagaccagcctggccaacatggtgaaaccctgtctctactaaaaataaggaaaaattagctaggtgtggtggggggcgcctgtggtcccagctactcaggaggctgaggcaggagaactccttgaacccaggaggcggaggctgtagtgagtcaagattgcaccactgcactccaacttgggtgacagagcaagactccatcttggaaaaaaaaaaaaagtaattttgaaacaaattaatagtacttatagaaataataagtaacatttatcatagacatttcaaattggcatttcagaagaaccttaataatgtggttaacagttatttccaataggatttgtcaataacaaatctaaataatgtgtaatatacatcttttatatcagcagttcagtcagataacaattctcaaaaacataggaaataggccaggtgcagtgacttatgcctgtaatcccagcactttgggaggccaaggcgggcggatcacctgaggtcgggagttcaagaccagcctgaccaacatggagaaaccctgtctctactaaaaatacaaaattagctaggtatgatggcgcatgcctgtaatcccagctacttgggaggctgatgcgggaaaatcacttgaacttgggaaggggaggttgcagtgagccgagatcgtgccattgcactctagcctgggcaacaagaatgaaactccatctcaaagaaaaaaaaaaaaaaaaatatatatatatatatatatatatataatgtatgcatgtatgtatatgaaataagttttatagggctgggcttggtggctcacgcctataatcccagcactttgggaggccaaggcaggtggatcacttgagttcacgagttcagatcagcctggccaacatggtgaagccccatctctactaaaaatacaaaaattagctgggcatgttggtgtgcgcctgtagtcccagctactcaggaagctgaggcacgagaatcacttgaacccaggaggcggaggttgcagtgcacggagatcataccactgcactccagcctcagtgacagaacaagactctgctcaaaaaacaacaacaaaaatttacggaaaaatatctcttattttcaaacataataactgcatgtttatcaactttgtaatctaggttagtctttcccttgctgtcattcatttaataatcacattttcttcaagtatgagtaaaacactacactaagcactaagactgcaaatattactaagacacacaggccttttcctcaaggagtgcggcatccagacacagaacctgagcagaattccatatgatatgaaggcactatactcaaagtgctacaagagtattagcacttggttcagcctgacagtttcaagaaaactacttagtagccccataaaagacaacagcaccaaaattctggaaacatggttattttggataaaatctgcaagccaaaaaaaagcaatcccctaatctatcatagaaaggcctaaatacactttgctcagaaatgagcatcacaatctaattatatcagaatatccagggggctagagcccagacagtagtatttgtaaaagctgcccaggtgactgtaacactgataatgtcataacatcatgactgatttaagcttagaatcctatcgacataaagacagagtcttgaggctgcattagtgaacacgtgggtccctaaggggatccattgtatgagactattttcattgtatttttacttgcaatcttttggtatgtgctaatagtatgaaagacaaaatttcatgttgggtatctcatggcacttcagcaaaggccaagaaaattaagtgattgctaatcctcaacactgtatgctgactaaaatgtctgtttaaaatttactttttaaagtaaagccagggcaagtagagacttgaaattaggaactttgtgtacataaagaccaagtcctgctaaggtcacttccaccacccctttccaagaaaaacacctacatatgagcatttagacaacaacaaaaccagcacataagaagtatgcgtcttggctgcgagcagtggctcacgcctgtaatcccaatactttgggagcctgaggcaggtggaaaccatgaacccaggagtctgagatcagcagggcaacatgaggaagccccctatctacaaaaaaatacgaaaaaaattatctgggcatagtcgtgtgcgcctgtagtcccagctactcaggaggctgaggcaggaggatcaattgagcccgggagttccagggagttcaattacagtgagctgtgatcatgccactgcactccagcctgggtgacagaacaagaccatgtctcaaaaaataaaagcaaaaaagaagtatgcaccttgtgatacagagtaagttctagagaaatgaagagaaggtagagataaaggtgagctggagtggttggggcagagtcttatgaaggaagaagacctgagtaggacctcggtgggactgacaggctcagattagagaagcagcactctagctgtcttggaggaagaaggtgtaaaaagcaacagtatgatgaagctgaaaaaagcatggtgcttgggaaggcactgaggaaacaccagatctccttaaaggagatcaacactggacaaatgacaggttgaggagtacaaacttaatcttggtgaaaaacagggttacactttgctttaatataaaaaatgattttagggctgggcgcggtggctcacgcctgtaatcccagcactttgggaggctgaggcaggcgaatcacctgaggtcaggagttcaagaccagcctggccaacatgatgaaaccctgtctctactaaaaatacaaaaattagcaaggcgtggtggcacacacctataattccagctacttgggaggccgaggcaggagaaccacttgaacccaggaggtggaggttgcagtgagccgagatcatgccactgcactccagcctgggcaacagagtgagaccctgtctcaaaaaacaaacaagcaaacaaacaaagaaaaaacatgattttagaagattcttcaggtagatgaatatgcagaatgcactgaaattcagggagctgggattattgaagatgaagagaacacattgatattttccaagcacagcttctgaatacaataggcatttttaaagtgtgaagattttaagtgaacactgtacagcacaatacaaaccttggtatcactccaaaatgaaggccaaattaattttaaaagtcaaatgacttaagaaggtttgttagctcttaaatattaatatgttaagtattactgtaaagcttatagtaggaaagataatgacattccaagagattagacatccatttatgttagctttacagaaagagtcaatattccaacattttttttctgaattgctcacatagtctaaatctaatgaaaatagaatagcttagacaatattttaatattctttctccttagaatgcacattaatgccaaaataaatgttttagggccttttggtaaaaacaaaccattatttggcataaaagacggctgctggaggttttggaaatattattattcttaggtttcctaaccttggagtaaagtgtagcaataattctaaaaactataagtaatacacagtttgtagctgaacatttgacttgctattatgagtaatcataattaaagaaacatttagaatttatacaagattagtaagtcaggtaacgtcaccaaaaaacacaagcagctgaaaaatgcttcccatacaaaaacaaacattcgccccacccaacccccacaatattttaattcagaattcatcagtataagaattccacttgtagtaaaaaatatatgcaatggaaattaatactgtaccaaggtatagtttaaatacaaaaaacaacttgaagcaattaagtccatactgattgagtatagccaatattatttatacttatttcttggaagacctagagccccttctccttcattcaaaaaatatatgtaccaaatatatatttcttatatactgttctttgcttaagacttttcattatgtcactatctttttccccatcaagatgcaattatactatttagtcaagttaacactttaactgacattaatattctacatgcaaagagtgaggtcttatgctcttcatttattgaggctggagaaagcttagtagtttaagatatttaagggcttatatttgtaagtatgcctttcaaacactatttttaatttataaagatataatcagtaactaaactaatcccaacactaggattatttgcctaaatcatatatatgtgtatatataatcatatacttttttttctttttaatttttgaaacagggtctcactgtgttgcccaagctggagcgcagtggcgagatcaaggctcactgcagtctcgaccttccagactcaatcaatccgcccacctcagcctcccaagtagcggggactaaagggcacacgacggagccgaactactttttgtattttttgtacagaaagggtttcaccacgctgcccagactggtctcaaactccccgcctcaagcgatcagccccccttggcctcccaaagtgctgggactacaggcgtgagcccccacacctggcatatcttacattaagaaagacccagtatccaaattaattttaatttcatccatctgcccctaaaataactcaaacattactaatctatttttcttgtggtacaatagtccttttctttaaattagactatcaaaatacttttaaaaataatacaaaatcaatcatgtatctcacatgaaaatctagaggttgtttacaattcccttaatgaaaacacaacggccataacagaaatactccaacaatattggataatattagataatacctactactataactgacctaccagtaaatatgtcaagcaagacactgtatgggtttatgtgatacatgatacaaactgaaacaatatttctttggaaaaaacatttacttttagaagcagcagcagaacccaagaaagcaaaatcctgcaaccaaaacctgcatctccctgcaccccctcaacaaaaacctgttaacaaaaagtttgcaggaaaataagtttgattaaaaggaaatacaagcataatctgctagaggaaatacagtgaaagggttgtcgggctcttttctaaaaaatggttgcatctgaattgtttcaaatcaaaacagagaccatgacaaattgggctctaacagatgacttacagagcacagcgacagccccagactcgaacatgagacattcttccttatgcctagtttccactatgaggctgaaaggtgggggatccaatttgtgatagatccggaatcctttactgaacgccattctcctttcttcggaggcagccctgcgaaaaccaagcaaagcaaagcaaatgaagctgatgtttccttctgcagcaaggactgcaaagcatccaaaagtccctccccgccaggttttgatggggggttggggtgggaaaaaacagacagctctgggagaaaatggctttttccaaaagataagtcgtcacttaattttaccaaaaagcaagaggaaaagctatcaattctcataccaaggcaagacaaggttttagcactgtaagtcaatcaacggtctggttgagtttcccgtttaatttatgcttactgaaaggaaaaattttgagcgtatttcgtccggagctgtttatcagcttcctgcttcaagatctgtcactacgttgaaagggaacctatttggaaacttcaagcagttccttcgaggtgaaaggagcggaggtgggagggaagggtgacaaggctggttcaaagctccttagggggcaggagaaggaaaaggattatcccacgcgacaggctctcccgggggtggcgatgaagggcaagggaaaaggcacaggttaccgccgcctctcctgccccgggctaccgccggctggggggacggcaggcggggccgataaatacgaatggccacccgggaagagtcacgactcggggcaccgacccgactggggctcctcgggggtcccgggcagtcgactgcccgggaaagcggctccttctcggagagacggaagagccgagcagcccaaaccctccatttatgcgccagaagagataccccggcgcccaggcggattcggttcgttcccgcgggcgggctgacagccgctgtcaccacagcccccagcctgacgcggcaccccgcacaaccagtggtctgctcacaaccccgcccgtcctcccgcaccccggctgctcgcggtcgcccctcaccgctcccgctgacgctgcggaggcagagactggtcttggaggcgtccgcccgcccggctgcccgtgggtctggccgcagcagctccccgccccccgccggcttgctcacctcttcctccggctcctcctcctccttctcccgcagccgccgccacagccgccgggagcgtcacttccgctccagcaggcccatctcttccgcattgcgccgcggccgggggcggaagatccgccccgcgcgagggaaggggcggggcatcaggagggagaccacgcccactctgcgccgaccggctgggcctggcacccgcgggcggccccagcctcagtctccagctacctttgcctcctgcggccgcccccaggcagagctgcgatcccaccgccgggggtgcagggagagggaagatctggcctccttggtccttttgcgtgggctcttcagagcgtgagcgccggggagggactccggagaaaagcttggggggctgcgtattgctgctccccaagctgggcgtcaggaccaaccccgccgcccccacgggcctgacgggagaggaggaagggctcgggacggtcggctcgccgagccaaccaggtggcgcctgaagagctgtccatggtgtcgacagcccagcaaacggcaccgagttcctagtctgagtgtctggataggtagcagaagaaaaactaatgcctgctctgggacagttctgttcggtgccttttcttgtgtgttctggagctcacagggttctatcgaagagtgcttaggtgtatacgatggagagtgggacgtcacaaaccaggatctcaaggctgagtccaacaaaacatggccgtagggaggccacgacagctgtggttgtcaccgacggatgaatagcttttgccaaccgtggaatttagtaactaaaggcacctaacccttttatctcatcctcatttttcaacaaatggtgcttcctggctaatatcagcgtgtcccatagatttctgcttccattgaatagacctaataagaaagagaatgaagtcaaagccaacagggcagaaagaaattgaaaacctgaagaacccagcactcaaactgtctccacttgcgtttgctttttctttacctcttctccttctggttttcaacagccaaagcaggatttaaatttggttatgttgcaaaaatcatttccctcttcaggccctgtcatgtgacttgattttttcgtccattttagagaagctgtacccaccctggtttcaggacacggaactaaatttattagaaaagaagccacttcaagtcatgaaggagaaacacaaagattcttggatttagttctaagaactagaggggatttctatgtcagtactgtctcagaaaaaactgttgatatcaaatgtgttgcttgagaagtacctttttttttttgagacggagtctcgctctgtccgcccaggctagagtgcagtggcgcgatctcggctcactgcaagctccgcctcccgggttcacgccgttctcctgcctcagcctcccgagtagctgggattacaggtgcccaccaccacgcccggctaatttttgtatttttagtagagacagggtttcaccgtgttagccaggatggtctcgatctcctgacctcgtgatccacccgcctcggcctcccaaagtgctgggataacaggcgtgagccatcgcgcccggccgagaggtaccttttatgacaactgaaatcattcagtttcaagaggagttgggtactgaaaccaaacttgcttactccaaagcccaaaatcctttccaccatgcctgtgtgtctgtaaggctacactagaaatgcttcctttcttatagtgggaagcatgggtactaagctcttttacgaacaagtgttctgcatattcctggttcctttttattttggactgaggagatttaggtcaaaatttctgggttctgggttggaattccagcttctttcttcaaattaaactggggggtagcaagacttattcctagatttgttagaaggccacagcttttccacatctcattttagtcatgaaaaagacacatgcccagagtttgaaaaacataaaggcaatttgactagtggcttgattggttctatcttctttttcttgtccctctttcctatttatacttctacttttgttacagcatttgacaatagttggaaaaattttcactgaccttgaaatgtctttgggatagggtgacttaaaatataggttaagtggcatacacaaacttcttagtgagatcctaagggcctacagagacaggctgacaccaactcaacccttgaaactgtgcaatgaagagcctgtgggaggctaaaaaacgctacttcaaaaagagatccttgtctgtgaatgttaatttaggtttacagatttgattaagggtcttgagattattttcaattatccaggtgggccctagagccctagatgcaatcataagtgtccttataacagggaggcagaggaaaattaaacacgcacacaggagagagagagagagaaaaaaaagtgatgtgaagacagcagcagagattggagcgatgtggccatagccaagctatgtcagcagccatcagaagttggaagaggcaaggaaggatttgagcctagagcctttggaaggagcatggccctgttggttctggcctccagaactgcaagaaaatacatttttgttgttttaaaccacccagttcatggtaatttgtaacaccagctacaagaaattaacacaaggctgatgtgactttccatcaggagagagacagccccaggtaggtgtttcagatatcacatccaatagaacaaattaaagacaaacaccctaaattctagatgttgatttgtgagcaagttatttctcctatgggcaactctagttgaaatatgcaattcattatgttgaaacatggaattgttattttcataggttaaaaaaaaatcacatagtggcaatatagtagtagtgctcgttttttgttttttgtttttttgtcaaaaatgctagacaacatggaagatcagggaaatattaacagtctgattcagtaacctttaacagcttcttttcaggttacacaggctaagctaacttttatatcaggatcaggatctgcagagttattagtatagtgctctgcagatcctggtcctagtatagcaggatctgcagaccctagttgtacctggccatgttccccaccaatgactgagaaagaaatggctcgaacagaaaacagtggtcttgaaaggcaacgcaacagtaggttacaaatagcattagctttttctttaaagaaattcattgtaaccagtgaaggataagattttaaattagaaaaatggaaatcctatgaataaaaaactagtaagcttgagagcagaatcactgtggaaaaaaaacagattgaaaaataacttgcaggtatcatagacaggaaattgccactagagaaaacaggaaacttgtgatagataaaaatgaagtattttcatttggaacaagagaccaactgaagagagatcaagtgaagggggtttattttaatgaaacacaaagattcttgtggaaatcaaagtgccggagccagaaacagggctcaaccttcaagattagagctgtattcaagttgttcaagttggctctcggtcccaaagcaacagcaatgtcactaaggttacaagtaaaaggtaagctttcatgatcaaaatgtttttgcaaagtagcttaaaatggtttctgcagtgttttgtcaaaacttttctcatacattttcctaaagatatttagcaagagcctaagaagtcatgtgctagggattttcattgtactgaatgattgtatcctttaagccgctgctggagttaggactgacaggaacgcagtacaaattactgggggctagagtcccaaagcaggccagggaccagtctacattgcatgtcgataccaatcccatataacaatattcagcctgtgtttgggcagtctgaggcagcttttagcagctgtgaacccagtatccatggacagtttcatttctggagggcagtcttcaaaacgtttatgaaagtacacctcccattcagatatgtttttttcttcctacatgtagtgctagtgtttttctcattttcatttacttgaaacaacagatcaaatgttttgtcataatcagtgaatggcaagactccctttattacatgggtattaccatgttagagataagaagagctcttgtaaccattaacaaccactacaatgtagcaacttacagtttcctattttatattgcagctctgtaacatttgactacttttgtaagagtttcatgatttcaaggatgattattagcattttcaattttttggccaattctgggtgctggtaatgttaccactgcaggcaactatggctctactcaactgaagacctcttataggcaatgtggaccatacctgctttcctgagagatcagcaaattgggtttggtcatcaggaaattctgtctctcagatctcatactagcaaggagacccctggttgtacctgtcagagctgccagttggccctgctgaaactttagaactgcaccaatgtctaagactttcatcctccttccttcacacaggtgagacctgcctgcctcattgtctgacagctttcccagcctcctccaggctcccctccgttttctcttatacgcattcccccaataaacttcctgtacatttaataccatctcagtgtctgctcccaggaggaccctaactgacacactggggcatttagcctccaattccttttctcccttggctgagatctgttccaggaagtatctccaggacactccagcctgttgcacaggccaaagaaaagccctcaggcagaggagcaaatacttgcaagaggacaccagtggcaagaacagggacatggtgagacttcgacatcattggctacagtagtactagtcactcttgactgtggtttatgttgtttcaataaagtagctttccttctcaaaaacatttgtcacctattttggagttaattcagaggattgctccaaaagaaaaaactgaaaagcaaaaccagctttattaaaatgtaaccctctggatttatcttttgataattcctttcataagaaataatgtccttaagctatttcaggaataaaaatgttctgcttgggatagaaaaaccattgttttatgtaccctacatcaaattcctagtgtgatgttcaaacccattcctgaaaccaatatagcctgacagatttcataggataaaaactctattttaagagttcttaaaagcagagtaattagtctaatgggtttggaaataatatgcagtttaaggcctaaatgatctgtatgtgatacagatacatgttttatgttttattctacttaagatgaggaataggtgttctgactttaattctacttagtaggccagtaaggtgtaatgaaaaattcatccagaatgaatactgatttggtttggttctgtgtccccacccaaatctcaccttgaattgtaataatccccacatcaagggcgggaccaggtggagataactgaatcatggggggtggtttccgccatgctgttctcctgagttctcatgaaatctcatggcttcataagggacttcccccttccctcagcactcatttctctctgcagccaccctgtgaagacgtgcctttcgtcaagattgtaagtttcctgaggccttcccacccatgcggaactgtgagtcaattaaacctctttataaattacctagtctcaagtatgtccctataacagcgtgagaatgaactaatacaaatatgtagggataagataaaattaacagagcaaatacagtgcatgacactgttctgcatattatgtcctgatcaagggtacacatgggcctgctcacagtcccactttattagagtcatttgaaatgctgcaaatttagtcgtcaggaaaatacaacaaaggatatatttaaaaattaatttaatgcttggctaaatcttaattacatatataattatcaaacgatagtccttaatttccaaaaaaattcctcttttgaaaatcacagaatcagaaagcataaactttaaaacaagttctctgaatatttacaatgtggtataaacattatagaagaccatggatattaaattgcctgggtgtggctaatcagcaaggcgtattctttattgcatatttaactcacatatgtgggattttaaatatgacagactactaaaattcaaatgcatgtatctgcaagctgggcagggagtaaaatcatgaatgagacaggacggtcagcccaaaaccatgcaattaggttgtgggtttattattttcaaaagtgaaatttctatgttccatttgaaactatgttgcatattcatttagcattcacattaaacccacatttgactctaacgctgattcaaggaagaaagttcaacattcactcaatgactaagtccacaactcaactctcaatgttaaggcagcacagctacagtgatagcaacgctaaccaaaaggtaatgaacatttagtcacttgccagcccttttgttacaacagtgtagtaatttccctaagacaatttgctaccggataattttctgctgttaaaaggcttcctctgtggaaaaacaccacaaatttccagtgtgaaagtaagtccatggtggtataaatatatatatgcataattacacaatttacactgcacacatcgtttacaggggacaattaactgagagggttaatttaaatgaccatacaaaatacttcagtaaacaaagtatgacaggcagtaaagaaaacattcatagactcctagaaataatctgaattcctttcattctgaagaaatatcatttaaggacacagtattgaatataatgttttttgtattaaaacaagaattgctattttacagtttaagaaactttacatatatacaaaatttacacattgggaatggtaatcaagcaaataggtttttcagtctcatagatctattttccttcgatcaaagacttaaattctttcacattgtggtcacttgcaacagacatagcatgatccaaagctcgaacacttgcaaggagttttactatctgttttatgttttccctaaaagaaaaaaatatagcagcatctcattaattagtatatctaagagaaaatttgctactgatttcatggctattttagagcttctgcaatcaatttttccaagcacacattttcaaagaaaggaaacagatatgcaagctacagcatgttaaaaaaaaaaaagtttacatttatccatatagaacaaaacttacatatgtttaaatgactagcccagagacaggggacccattttaaaaaagcaaaacaaaattcattgagatcaatgagtttcattaatattgagaaagaaaagaaagcaatctgttttcaaactacttcagaggcctgtctcccattccttcccaaaccagagtcctggctgttttagcgtatacctggaacacaaatcgttatttgtgtctcttcatcaccaatctgtcaagatccagcataatttccactccaccaaaattcactaaataaagtataatctgactttccttatcactccagctagaagtcattctgctttcttactaggaagtaatcctcaaattttagcacacattagaattacctagaggattgttgaaatgcagatcatccctggccccaccccaagagttctattcaagaggcccagagtggggccccgagaacttgcaagtctatcagactcccatgccatgctgatactgctggtccagggaccacactttaagaatgactgttttaacatttagcttaaaccactcacgagaaacaagacataatatgacattagtaattgtctcatctcttctacagaattgtagtaagcacctattagggaagaattagaatttgcaaaactttccaacccacatgaaacctgctttatgtgcactgcacaaagcaggtgcttacatagctgttaaagttcttttctgtagaaaagtaaacactatttgttgatatttaacttccaaacagaaacactgttaaatatatgtaaatcaaagtttaaaatgtgataaaatttatctagtagaaaacacagagaaaaaaatattagtgccaacaaataacaaaatggcacacactaagaacaaaatcaaatcagccaaaacctgccaaagaattttaccattaaaatcttttttgttgttgttttttgagacggagtgttggtctttcaccaggctggaatgcagtggcgcaatctcagctcactgcaacctctgcctcccaggttcaagcaattcccctgcctcagcctcccgagtaggtgggactataggcacgcaccaccacacccagctaatttttgtatttttagtagaaacagggtttcaccatgttggccaggatggtctccatctcctgacctcatgatccacctgcctcagcctcccaaagtactgggattacaggcatgagccaccatgcctggcctaaaatctttaatagctactttaattttattgtggaaaaaatatccaattttcttgcaggaaaataggtcctttttcaagaaaggggaatgagggatcagaagaaggttttgttataggggtatgactaatggtgtgatctaaacaaaaattagactttgacattatgaagatatatgaaattaaaattttaaaaagacaattccttcaaactgccctacttagtgttattatttactttttatgctagagatttatcccagaattacctgaacacccataaattaatgtccacagaaaggctaatggttcactcactcttttcttacaacccttgataaaaattagaaataagttgccccaaaaagccatgagtgataacctctagttcataatattgattaaaacaaaaaatctccccaaattgggagataaacttgaatttaaatctgcataatgaaactccaaacaagagagtctgagacctctctaattcttcaaagagggagacagagaaaacaaccgtttactcactcccctgagggttggtccttaccagaagtctttccttagtatcttcataaataacatactgaaaaaaagtaaaaactgctaaaatgaaaaattatgtgcatttttggtaggtttataatactaagtgaacatacaatttaaactaaaatataaacatctctacttaaaacattttaatactaaatctggcaactaaacaactctagattaccatttcattaattacaaaattaccttgcatttcttttttccacatcagaacacccgatactatttctataaattgtatccgctaagtgtacaaggtatcggcaaaagttttctaactgagaaatagtcctttctcctttcagattcatgaaccattgtttggggaaacaattgattacctgtggagaagaaagacgtaaaataaaatagttaagacagaataaattaaagtattaaaagcaaagtctagttaatgggtataaatgtatttcaccagaagacgtgcttctgagctacagcaattactctgaagaaatattcttttaaatctgacttcctacattaactaaaccaatatacctaaatttttaccccaaccaatgggttaggcactcaaagcaaaagataatctgtccaatatttgagtaaattagtaacataaaactgacaaccaactgcttcattttccagtcttctaggatggcctaaatatactgaatttccttttccagcagcttttgatgtaaaaatgagtggtataaaaatgaaattacagcacccccatcccctgcaataattccacgaatagacatccatgcatgctgctaagggaagtcgagttggcccagactgaggttaagataataaggttattattctgaaatcaaaacttttatttatacctataaaaatatcaaaactttcactaatatctataaaaatatggatatagatggatatatatatatataacagtatgcatttttatgtaaaaaatgctgtagggggttggaactacctgggtaggcaaactgtcaaccttacatgcaagtccagtaatcaaaggggtttcataaaattctcaaatccctcttcaaacaaacaaaaacttaattcattttaaattatatgctttaaaaactgtactatgcatttaactcacattttgggcttttttgatgctgtcatctccatattctgaattctgaaaagccatgagaatatatcgatttaataaaccatctattgataactcttgcagagttttatttgagaaaatgccataccactgaagaaaattgcctaacagctggaaagaagaaaaaaaataggtaatgtgaaacaattagattaggtacaaagtaaataagttacatagtaaaacaccatatgaaatacagcagaccatgtcttgccaaagtactaagaaatattaatactttcaaaggtacagatatttcctagaatggttacatttgaatattcaattttaattagtcaaaatcgaaacagccacatgtagctagtggctacagcactggtcagcacagatacagaacattttccatcattgcagacagtactatcagggagtgctgagtcttaggtaagtgtcctccattcaaaattacactctagctggttctatgcacacccccaccccgccccgcgctgcccacaaaagatgggagagtctgactacaaccctgcatggctaccatgtatcatgaactacaaccaagttatatcacttatgcatctcaagctacccaagctcaatcaatatatagaaaatgaaagctatcatcataaaatgaaagccccatcccatcccaccataaaaacttatagtttcccagttgtttctcaacttagtaaatggtaacactattcaaccagctgcttgcggcagaggtctggaggtcattcctgacctctctctcaagttgtgtgtctccacgaccatccagtctgtccatttccctcagttcctgctgccatcctccgaatctgacccaccttaatctcttcagaaccctgcagttactccagtgattatgagcaagagcactgagtagcctttctgaagcagggctctgcaagagttctaaacctacagaaaatgatttgtgtggctctttactcagttctcccaagaatgatacatagctagtactgttacagatgcaggggaaaaagaagaattcattatagacaatggaggccttagggcattaggtattaagtctcccacagaagcccagttgagaagagcagctcaagagtcagactggctgagtttgattcccatctctaattaccaatggaatgaccttgtgcaggttattgtgtgcctcactaccccatcagtaaagtgaaaaaacagcgtgtacctcattgagccattctgaggattcaacaagataatctatgtaaaaggtgcgggacagtgcttggtacatagtaaacacacagtaagtactagttcccataaaatacacaataaataccagttcccattttcactatcactatccatacctacttcaatctattatctccacatagcagacagagtaatcttaaaaatggtaatttatagacctgtggttacggccgggcgcggtggctcacacctgtaatcccagcactttgggaggctgaggcgggcagatcacgaggtcaggagatcgagaccatcctggctaacatgatgaaaccccgtctctactaaaaatacaaaaaagtagccgggcgtggtggtgggcgcctgtagtcccagctactcggaaggctgagccaggcaatttatggctgggcacagtggcttatacctgtaatcccagtactttgggaggccaaggaaggaggaccacttgagctcaggagtttgagaccagcctaggcaacacaagacctcgtctctttaaaaaaaaaaaaaaaaaaaaaaaaaaaaaggcaatttgtttacttaccttaaacccttccatgacacatatagttaactggttttcaacaaaggcacaaaagcaattcaatggactgtgaaagggaaatatcttgggcctcttcaagctggggaccccgctgagggcaaatctgcctcccattctattcaaagtcatctctcagctcacagagatagatgcatattctgattgcctcttctggaaaaacttatcagaaactccaaagaatgcaaccatccctctctcacctacatgtgacctggaagtccccaatgggggggccttgctttgagctgtctccacctttctggatggaactaatgtatttcttacatattgattgatgtctcgtgtctccctaaaatgtataaaaccaagctgtgccccgaccaccttgggcacatgtcatcagaacttcctaaggctgtgtcacaggtgtgtcctcaatcttggcaaaataaactttctaaattaactgagacctgtctcaaatttttggtgttcataggacaaaggaatttttggtgttcacagaaaaggctatcgccttttcaacaaatagtgctggaacaagtaaaccttaatccaggcctcacaccctataataaaaattaacctgaaaagagtcacagacctaaatgtaaaacctaaaactatgaaacttctagaagaaaggataggagaaaacctttgtggcttcatattaggcaaagatttcttagatatgacatctaaagcacaatccataacaggaaaaaaagatcaactggacttcatcaaaattaagaacttctgcatatggaagactattagaatggaaagataagccacaaactgaaaaaaaaaaatctgcaaatcatttatatgataaacgacttctctccagaatatagaattcaatgcttagtaagaataaagcccaatttaaaacctaagcaaaagatttgaagacatttcaccaaaatacataaacaaattccaaataagcacatgaaaacgtcctcaacactgtcattagggaaatgcaaatgaaaaccacaatgagataccacattgcaccctgtagaatgacttaaaaagcaaaacactgacaacagcaagtatggtgggagtaaggaataaccaggacagtaataggttactggtaagaacgcaaaattatacagccacttcagaagacagctttgcccggctgtttcacccaaatgaaatgaaacttacatattcagaacacccttatagaagctcttacacccttatagaaggtctgttcataaccaaattggaaatgtcggggccaagggaaggcttcccctttgccctatgaagtttcgctgaaaattactgacaagaggcaaattaacaggagaaaaggcatataaatttatttgatcacagttttatgtaacatgacagccttcagaatgaagacccaaagatggaggagaaattgtctactatgtttaggtttaacgaaatatgtacaggcatgcagaaacatgactggacaaaaaggtatgatctactgctcaagagaagacaacacaaggcctgtccgtccagattcttcttggcctctctgagcagcattctttccttctgggtatggggcaggaccctctctggaatgggggttttatgacctataatcaaacaaggtaggtcagatgttttatggccagtttttacacagaaaggcagaggcaaaattaagagtaatatatttaggttttatggttggctttgcggaaaaggggttctggtgtctatgacccgcctggggcaacagggattctagtttctatggcaaccctcaagggagaacaggactgaaaggtgggcaggagaaggtcaaagaaaaagttcttctaaggctgtttctgaggccttcattttatggtattgttttctgagtcccaagagaaacaatccaaatgtcccttaattagggactaaatgaaaaccaaaacctaactctggtgcacctacacagcaaggctgaacctcaaatttattcagtggaagcagccagactcaaaagactttgcctatcatgtaattcccttctcttcataggacatagactgggaggtggccaggggcttgtggtgaccttgactacaaaagagaatggggaatttctcaggacaataaaagttgtacatatcttgattttggtagtgataacatggctgtatctgctcatcagaatttacagaactatacactaaaaagagtgaattttaccgtatgtaaattataccttttattttttttttaaggaaaaaatcttcctgtgacttcctacaacttttgggataaggaccaaagtatttcaaatgacctacaagatcctctatcatctggactatggacttacttgctcactccagctgtcctatgctttcttcagcgcctccagtgtagcctgctctctttcacctcagggctaacttctattttttctccaggtcgaatgatctaaatatcacttcctcagggtggaaggaaatcttctgggactagctagtcaaggtctctgtgccccttgtcatatgttccacattaccttgaatgtcccctttcataactcatcacacctgagattacctatttgttgtcaactgtgctggactgtgaactccacaaagattccacttctagcttactcagtgctatatccccgaacctcagaagagtatctgctacagcagtactccttatctgtggtttcagtcagctgtggcacagtacaataacatattttgagagagaaactacattcatataacctttaccacagtatattattaataactgttctattattagttattgttaatctcttactgtgcctaatttataagttaaactttatcataggtatgtatgtagaggaaaaaacagtatatatagggttcggtactatctgtggtttcaggtagccactgggcatcttagaacatataccccatggatacagggaggactactgtagtctacttgctgaaaaaattaattgtggcttagtcaggcatttcgttgagtacgatggaccttactttggaactcagaaatcactttctcctgtgaaaatatcaaacttgaatgaacttttggaataaaatactttgtaaaatggagattttgggtatagatataaatagatctaagcctatggagttaataaaaaacaaaacactctaaaaaatgtaatatatgaagtcaaacgaaatctgagtcttttagatagtctatggacacgtaccttaactgaagaccaaaactgtcgttgaaaaaacaagtaaggcccagaatttttattttctaagacactaagtaaaaaaaagagaaacatatcatgatcagatattttatatgtaggtgccatatgattcctggacaaaagatttttctacaaaacaggtaaacaaaataaatttttaatttttcaaataattgcattctggaagatagtatgttaaaaaggcaatggaaatttattctgagacactcagggagaacgtaagagtattgttttattctgcttaagggaacaatctcgccactaatctagtctctctgtaatacactacatgggtgaagtttgtatttcaagctagtttttcagaattttataagccttctctgaaacacaatggagaatattatctttaatgttcttcagagttacttactttttgggatataagggcataaatacatcatcatctaaagttcttctcattctcaataaaagtgcctttaggtatacctaaaaagttaaaagtagatcacacattttaataaggactatgacaagaaaaataagccatattccaaatcatgtaactgaatattgaactgagtgaactagtttctcaaatttttaattttcctcattgaagaccctaaagtaattaatacttaataatctattagttcattcctcaacaactgccaagcaataaagctttagaaatctttcaattccttagtctacataaagatttaagaccagacacataatctagctctcaaagtgaaaattcaacaatgacaaagagcacccaccttctctacatttaaacagcttctatgaatggcccctgaagagcattaactttaagtttggcaactagttataaaacagtatctagttgttttatatgctgtttaaatggtttgggtgcccaatcttttggcttccctgggccatactggaagaactgtcttgggccacacataaaatacaatgacactaatgacagctgatgagctaaaaaaaaaaaaaaaagaaaaaaaaaaaggaggggggcggggtctgtgcataaatttcatgtattaagacagtttacaaatttgtgttgggccgcattcaaagccgtcctgggccacatgtccatgggccacgggttggacaagcttaaattatcaattgttaacattttggtttctcatttccccccagaaaatacagtctttaaaaggacatttgattagttggattgggactgaggtgtggtggtgagaaatcataatgaaaggctatttaaaatgatgacatcttccttccatattgatttttttaaactgaaaactaacatctctctgcgggactaggtataaaaaaaagaaaaaaaaaacctaacatctcaaattttgtgtatttcaggctttaatggccctgatggcccaagtgggagaaccagatttctgattggtttaggataaccactcattctctcaatgcttgctcatattcaacagaaagaggaaaaaaaaaaaaggcttcaaaagatactaaattacctgtgtatttttattttctgcattcactactgaaggatatccattgattaattttagtgtaattcccaccattcttgaagtctgtgttgtagaaaaagggtcccacatattttcagctatcactattaagaaaaaaagaggattgagacacagaagccaattgtacctttaattttttgtcaagcagacctctattaatgccaatcctaatttatttttcctctttttctacaatataagctttagtcttctttgtcctattaactgtgggaatttggagggatagggatgtggagagaggatagattattcttatttctggtactcagggaaaataaagattaggaaaaaagaggatttctgtagaaatgttgtcttggcatcaagaatttcaaactaacatttctagtatttaaaatagattcctgtatcaatgattcctaatcttttttgaggaacttatgaaagcattttaattgctccccacataaatgcatatcctcctccctcaaactctgtataattttgcttcagtcagtctttgaatttctaaacctcacctatgaagcaattactgcactcaactacaggcccaccctaaagtggtcttcaagtcccaggataagaacccctctgccctctagccatctctgggccaggtggtaactattatttctcatgtaatttctataaggaaacatgctctgaattataaactcataaaaatagatttgagaaagccagtgtgtctgaatgctcaattcagagaacaggagatttacctgttagtttaggaagaatcaccttttccacaatggtaggtagtagggcaacatctacatcatctttttcttgctctcgttcttcacaaccataaaacagcaaagattcaaaccacagcatattctcaaagtcacgacattttgcctaaaagacatttaaaaggttacccaaatactaaaatagtggctatttctgcttccagctatgataagagaaacaagaactggatttaacctttggttgcaaacaactaaaaactggacggctggagatatcatgctaccagacttcaaactataaggccacagtaaccaaaacagcatggtactgatacaaaaacagacacatagaccaatggaacagaatagagaactcagcaataagaccgcacacctacaaccatctgatctccgacaaacctgacacgaacaagcaatggggaaaagattccctgtttaataaatggtgttgggagaattggctagccatatacagaaaattgaaactgggctccttccttacaccatatacaaaagttaagtcaagatggattaaagacttaaatgtaaaccccaaaactataaaaatcctagaagaaaatctaggcaataccattcaagacatcggcatgggcaaagatttcacgacaaaaacaccaaaagcaactgcaacaaaagcaaaaattgacaaatggtatctaattcaactaaagagcttctacgcagcaaaagaaactattatcagagtgaacagacaacctacagaatgggagaaaattcttgcaatctatccatctgacaaaggtctaatatccagagtctacaggaaactttataggaaaaaaacaaccccattaaaagtgggcaaaggacatgaacagatacttctcaaaagaagacattcatgtagccaacaaacatgaaaaaaagctcaacatcaccgatgattggagaaatgcaaatctaaaccacaatgagataccatcccatgccaatcagaatgggaattatttaaaagtccagaaacaaaagatgctggtaaggtttcagagaaaaaggaacacttttacactattggtgggagtgtaaggaagacagtgtgccaattcctcacagatctagaagcagaaatgccatttgacccagcaatcccattactgggtatatacctacagaaatataaatcattctattataaagctacatgcatatgtatgttcactgcagcactattcacaatagcaaagacatggaatcaacccaaatgcccatcaattatagactggataaagaaaatgttatacatatacaccatggaatactatgcagccataaaaaggaacgaggtcatgtcctttgcagggacatggatggagctagaagccattatcctcagcaaactaacgcaggaacagaaacccaagcaccacatgttctcgcaagtgggagctgaacaatgagaatatatggacacatactggggaaaaacacacactgaggcctgttggggggtgggggtggggacttgggggagggagagcaacaacagctactggatgctaggcttcctaccaaggtgatgggttgatctgtgctgtaaaccaccatgtcacatgtttacctatgtaacaaatctgcacatgtaccctggaacttaaaagccaaagaaaataaaaaagaactggacaaaatacaatggaccataggcagcacaagactatgaccctttaaagaaaggaatcaaatgaggtgagatgctagttcaggacagcagagcagttttgctgagtggaggagacagagggtggagctcaggaaggctgacacagctggaaactgtggggcagaggagtgggggacacagaaaaataactccaaaatacagtcttgggcctttgctatctaccaagacactcatgcacacagcaaaacttcagaaggtctggccaagagcacacaggaaataggagctgtgagctgaatgcttctcagagctcacatttttttcagttgtgtttccatggcatcaacctcagctcccttttccttatagttcacaaattcaacctagccaatctcaaccatgtctacagcttcacccacgttggtaacttctaaaaccacattgtaaacatcaccactagacctccagagtcaattctagccccctcccttatatgacaggccaataggtcctcttgattccacctccttatctttttttttttttcttgtggcaggtcttgttctatcacccaggctgcagtgcagtggcacaatcatagctcattacagccttgatctcccgggctcaagcaatcctgcctcagcccccgaagtagctaggaatatgagcacatgccaccacagctaattttttttttttttttttaagtagagacaaggtcttgctatgttgcccaggctggtcttgaactcctgagctcaaacaatcctcccgccttggcctcccaaactgttgggattacaagcatgagccaccatgcctggcctatcaatttttctcaccatgacaactgacttgggtcatgtcctcatttcacacctgcctcattgtgctttcccatctggttctgagttcctctaggatcaaaggaccaagttcttactattcatgttcatatcccagtgttactgcatataatttcagctggctgaaaaaaggattatatgtaaactgaaaaaacaacaacaacaacaaaaaaaacacatagctctgctgggaagacatgaaacttaaaaggaaagatcataagattataaccagatacaatctatcaattatagcctatgccctatcacccctgcaaaatattttgcttaagcttacatctctagctttgagattaaaattacccagatatcaaattataacactttctaatagtgacagaagccactcacctcaagaggagtccaagtgaggagctgaagtcgtatgagggggttgaataattttggcaaacaaaggccaatgtaagcatctttgtaggatgtgtagtattttgaacgccatgcttcaaactgtgatttaatacagtcaattgaatagaaactttcaaggacatcttcaaaaactttgccggattcttttgaaattcgatctaaaaacaacaaaaccccacagagaaccatacattagtatgaagtaggaaaaaaacagtccaatattttcagtgttttctttgtagcttcagtatcagaagatacgctcattaacaaagggccaattgttagtcacaatttagaagaaaaaaataaattgaagtttcaatttgtctattatgtaaactaaagtgcagccagtccttgttttgcagttccagtatatacaatttttctaccacagtttggctaaataaaacctgttcccaaacaagatggttcaaatttcagttactacggtgtattagccataagtaattgtgccgctagctttttagttcacagatcactgcacagattaacagctgtgcatcataatcagtcactaatcacattgcttcattcaaactctgttggtgattataataactgacatagccaactatcagctgaatggatgctaggaactttaagtgaaaagttatttgcgaataagattttttttttttttttgagacagattctcactctgtcacccaggctggagtgaagtggtgcgatctcagctcactgcaatctctgcctcccaggttcaagtgattctcctgcctcagcctcctgagtagctgggattacaggtatgcgccaccatgcccaactaatttttgtatttttagtagagatggagtttcatcatgtgagccaggctggtctcgaattcctgacttcaagtggtccgctgcctcggcctcccaaagtgctgggattacaggtgtgagccactgtgcccaaccaagaataagatactcttatgatgtcccagattacttgggaaaaggaaatatttacaatggagagataaagttctgagaacctttactgcaagatcaatcttaacattgctaatagtggggacagtctaacatttgtcatgtgcttttaagcagtatgaaacagcatcctgtataaattattcttggggaagaaaaaaaaaaagtttaacttaaatctaattaagccttcagacctaaattccagtttacaagaaatggatcaaagaacaagttaaacaatgctatgaggaaacatacagaccagtctagaatataggacagtctataagagaagtggcctggtctcttcaaaaatttaaagaacaataggggtgggtgtgtgaatgtgtacttagggttactcatttattccagatttaaaaatgtcataaccaaatgcagagcatgaaccttaggtggatcctggtttcaaaaaccacaaaataacccataaaaatagttcctaaaaagggtttttccaggatgccattgagaaaaattatatatggacatgatattaagaaatctgttttcttattgtgctaaaaaaagaaatacttaatcagaataggcatctaacaaaaagaaaaaagataataatactgtgattatacagaaaaatatactcatttagaggaaacacactctgaaattttggggagtgaagagccatgaggtctgtaagttactttcaaatggttcagcaaacacacacatctccttgtataaagagccaggcaaacttggtgaaatcataagcattgttatctgagtgataggtatgtggatgatcactgtgctagtctttcaaattttgtttagaaatgttcactgtaaaaaaagtaagagaaagaagcttctccaactaagttccaaatggtgtgcaattgatataattccaaacaattatagccaatggtgggaaatgaagacttttatttgggatccttctgaaaatgcctggcacataatagtactaaccattcctctaaggtgagattacttatgactccccaaatcaagagtttccttcagggctgagtgctctactgccaagctttacctttccagaccagacaggctgcaatgagagctgccctcaaggacctgacacatttccagtcacttaaaattctaccatttggaacagtaacaacatttattatgcaaatactaagtacaccctatgagaagatgttacccctatttttgagaattcatcatgatattcactaataaaaaggcatgcaaatttctgcaattaaaaaagaagtgtctggttctaatgcagagaccatgaagattcaaatcatttcatggtaaaaaccatacccaagtagaaactaaactgatgatgagtcttatttccaaataaatgtctaacctttttccagattgaaattagtaatatctgtagaagtttcttcatcatcactggaaaggccttcaaggtgatctgccatcttaccggtttgttctctggcttgtctacgacgagtcctaaataataaacatcaagttcccaaactagataacagagactcctcccttcccaaacaagccagagcaagggttttgagaattacctcctggcctcccgctctgcaatgcgacgttttgcatgctcttgatacagtgcccgatcgcgtccaaaggagtcaagatttggtgccatcagagctttgtctgcaaaacaacaacagttaaaattaaaagccatctttcaacaatcttgaggaaagagtttgcacagaataagccattacgacagactgcttgctaatctcaacggcaagattctgcaataactggtaaaccaggtaggtttttggtttagaacaaatttcattattattctgcgttcccattttaaaaagtagaaaaattaaagaagtgatttctttttaagagttcaacaaccctacaaatatgtaattgggcttactcactatttttatgtctaagtaacaggacagctatcaggaatagctatcatgatgaccaaataaattaaaactctaaattacctgtgcaaagggaaaaatattacatttttaaggaggaagaacttcagcatcacattgaatgacagcaggaaaacataggaagacataagaaaacagctttgttgcaagagtttaataaatttattgtaattttgctttgtagaaatttgttttctatcactatttttagaataaggcatctgaaaaccgcatctgagcaggaccaacttccgccttctcaaatgctaatctttctctttcacagcatagttttattttatttttttggtcttcgtattttccatttctcaaaaaacattctagggtaatttcctagctttagcttccaatcctatttaaatttatatttcagttatcatatttttagttttcaagagatagttcttgttcttacaatattcctcttctacagcattctatatactcctgttgagtaggataccttctattatctccctggggctcccaactgtttgaaagtaatctgtttacagaaaacttgcatacttgtaccagcactgtctgtttcctcagtccctttggttctgctgctcaggttggtccttatgatcatcgttaactgcctgttcatatagaagagcaagactggaagctgtgtgtgtgggcaggagctgtctaacagaggtgtctccgtcggatcactaggtactgagccagttcttttgttggggatccccagattttagtgtttcagggtctttattttggacctactctctttaatcaaaaaagactcccctaatctcttgcctaggtaaaagaaggggtgggggaaacatctgtccactatacttccctcatttctacgttttagttccacactatgaagatatgacagtaaggggaggcaaacaacccaaacgactgggtgagaggggagggaggtgagcacatgcaagatgaaagacatccaagttaagacttgcatatttttttacttatcaattgatatttactgatatcaacagagatgtgtcaccaaaatcagcaacaggaaaaacaaaaccaaaatttagctcttacttcagaatatcctaattatcagaccttactatctatctatctatttatttattgagacggagtcttgctcttgtcgcccagaatggagtgcaatggcacaacctcagttcactgcaacctccgccgcccaggttcaagcgattctcccgcctcagcctcctcctgagtagctgggattacaggcacccgccaccagctaatttttgtatttttagagacggggttttgccatgttggccaagctggtctcaaactccgcctcggcctctcaaagtgctgggattacaggcgagagccaccgtgcctgaccagaccctactatttttaaaagttgacttttttttttactgagtttttcattcatatttcaaaatagctctgaaattaggaaggaggtatgttcctgagtgcatcaattacaatgaaaaattactaaaccagaaagatttcccagccctagatgtgagttcactacacaccccagatgaattagctaaaatatcccaaactataaaaataattccagactcaagagttttccttcaagaaatatttttaaaaatatcattatacggctgggcacggtggctcacgcctgtaatcccagcactttgggaggctgaggctggtggatcacgaggtcaggagttcaagaccagcctgaccaacatggtgaaaccccgtctctactaaaaaaaatacaaaaatcagccaggcgtagctgaggcaggagaattgcttgaacccgggaggcggaggtggcggtgagccgagattgcgccattgcactccagcctgggcaacaaagcgagactccgtctcaaaaaaaaaaaaaaaaaaaaaacattatacttaaaacatcactgcatgtataggttttgtaaaatgtgcactggaggagacaggtgagtctaacatgactcaagtgatagcctcctccatttctgtaagaattatacacagtaattgcagataagtgcttataaatctaaacagaagaatttcagactattctttacttctttaaaaaacagatcagaaaatgaattgattctccagcatcccatgtcattttcctcaaatctttggcaattaatgtatactccctctaggactgtatttttcactttcccagtatcttttaatttctttccaactttcaatcaaactaatataaataattcaactcttctttcaaatcccctctaagtaaatagctccatattctcaagaacaaattacagatgggaaaaggtatttgatgaaatgtacagctcacacaaaccatctaacttaaaagaaaattacctccctttgtagtataatggttacctgtaatctgccccagaaatctggttctgtctggatcaaaagtgatctgggagggatgcatgagtcatgtaggtggctaatgtcaataatccaatttaaaattcagtggcaaaaacagaaggtcatagccatttatagggctcatagctgagactacctcagctatgagggccgtattaccatctgtttatgcctctccaaaacccatctgacatataggaggatgctttttcagggatcctatgtctctctgacttagagaccatgtatagcaaagcattgctttctgaaagaataacattagagctatttgcatttgatcacctggagagattgtttaacatgcaaatttctggatgctgaagacctagtaagaatcactggggatagaaccagaaaatctgtatgttaaacgagtatcaggtaattgtgatgcacacttccatttgagaaatgctgacaaagggaacaaagaaatgacaaaagaaaccacaaggaattcacactaggaaaattcctattagcgcactcaagaatatggagggtaacggaaaaaaaggaactaaacggtttaaaacatccagttaaaggacctccgctgaactatttaacaagaggtttctaattctggttttccataacacatgtcataatgatggaagtacaaattcaatttctatccatttgtatacaaaatttcaagaattgtaagcaccaactgacttactaaaaaacacagtacataaagcaaactagagaaacatttaaaaagaaattacaaaaagtttgctttatccaaaggatgaagctcaaaactctcctatcttggagttgtgtcatttgttaagttatagcttccctccccctacccacaacatgtcccagtccctaaactcaaactctttcactgtgatcaacaaaagcatttatttgtattggtgttttgaatgaaaatgggggaaaaaaccaattagggccaaacagataatggttttaacataaaatacggataatgtcttttctatactctaaaggagaatgaaaaaatatgcccaaagaataagaagactgacagaatcttagcacgtttttgagctcctttgtgaagctctattttcttaaacacaattcaagtacatgctgttaccatttttagatctacctgacacaacagcaaggaaattgtttctttaaaaaaaaaaaaaaaagctccaagatctctaattttcaattaggctgcactaagtaaacaaggttgtttaatgaataataaaaaccttcaagatggactgacttgaatggcttgaaaactccgaagattcatctttaatatcatcttgtcgtctttggacaaggcgggaagctcgctgtttgtacagctgatgtattgctgattcaagttcattaatcagtggcacctgtaaaaatacaacacactccgtaacaccaaactcctcagctgcttatttatttgagggttccatactatttccggatttctgaaaaagtaccctctctatggacagaataatcatgaatccccaacagcacacaagtagcaaattctgttttatgtttgggaaacgacacttcttcttttaatccatgcatagagctataatgtccagtgcctagttattggagcaaacattagttaagaaatgtaacacttcagtattcatagaacaagtaaagaaatgtcaacaattttagagcttttcccttagagaatatttaagtacttagaagtctttttaatatctatttttaattttccagcagcattatctgcattgcgatttttgtagttcaaagtaaaacattatcactgtgtggtaccaaaaaagtgcaatggctctataagtaggtaagaacaagagtctgctaattctccaattttggacatttcagttgctctgccactcatatgtaccaagtacgttacagtaatctgtttactattttgtagctttattacagattttttaatgtaaacaaaataattactagggcgaataaaatttccagctatcactaacctctctgaactcaatatatctcaaatttaaaaagttgttctcttcctgtcaaatgtttaaattctcccatattttataaaaatttctttacatgaattgtgaacttacaaagtcaataatttttccaggttaatatccctaaagcatttacttgattcatatagaatacaaaagaacatgagagctaacttaaaacagaaaactttctttttctaaataccttatgttataatcaaatgctatgagactttcacgtaacactaatgaccactacacatacctgaggaaaccagaaattctagtttcctgatggttagtgcaaatggaaaacacattatttagagtttgggaacactggcaccaagtgttatagcagcttcctgaactgaacagactgcaaatggaaaataaaaaaaggcaggtggaatacagagatgtctgtaataaaagcaattttatatacttgcatgattccattgcaaaagtagcaaatgttcacagaaaggtcaaactaatggagttattttgttctttaatatgccacaccatgggcaacaatgtccccaaatctgtaatgattatccttgatagctgagtccagagactctatcattaaaatttattataatctgatttttttttagcaattactgccacaacattgccatttacacttccccatgccctcatttttttttttaaaccatgaagtactaaagataaatgagcctgaggcattcttttatcttttaatcctagagattgttaagcttcctgtactgtaggaactacccacctaagctggcatcatacagaatataattttgcaacatatagttaagattctgacaatgtagtttttctctttaggttaactggaatgccttttaccggaggtccagagaaaaactctactgagaataaaagccctaaacagactgtgagctctcattcaagtttcttaacaatattgatttatctcaagagtctgcaccgtgacaatttctttatcctctccaaactcaaaactctcaccaattattactattttagggccaaagttaaggcaaagaacccaagaaagataattacagggaaacaaaaacaatggcaagttaaaatgatttacaaatatttaaaacttctttaaaaaccacctaaactttcataagcaaagaggaaaaaaaaagggatctttatctttttacggttaactctgaaatattattatagtataattattcaaagtatccaattatttctaagtatctccaatataacaatttatattatcaactcagcagtacttttttgttttttctttatttttaagattatcttctaaagatctaagctgagcagtactcttaaaatgaaatacacatgaaaatgttagaatgaaatataatactcatctttaaatgaagctatgtctacctctcttttaattaaaacgtagtcactgtataaggtttaagatttgttccaaaaaatctaagtgactctgtataaccacattagcataatctgaagtaaacttctctaggaacaaggtaatcgagatgaaatacactaataattcaacaattaaaaactataaactaggttgtcctacttttggtatgatctagctgatcatattactgtcaaattttttagagttgtgtttgcaattatgaatgtcttaatttactcaagaaagttccgaagcaagcgccaagacacttcaagaagcagctctccagggacaaactcataaagcatagtttaagaaaaagatcctttctctagtcacaaaggttatgagaccagctcccaccatgcccactgggctcagaagagttttgccagtaggaaggacatgactgtcaactcttgacacttaggttccacttccaatcttgactccagctcccggcacagaggaatacagacaagcctatacttcttccccaccctaagcaactgatacaccacaagtggtatcataactcagactgcagctgcttctccagaaaccaggtgataaagacaaaacatgagaaaccctacagagaggacatggtgaatgttatctcatcctgaatctggccacagactgactggaaccattaagacccatcaggaagaaagatccatcaggaagacatagtctggcaatgatcttttcccagccattggttttagggtattcaagtaatcaacaaagataacaaaagttgaaatacatatttaaccacactatatgcttacagattctaagctaatctacatagccaataacaaagggaaatgtgccttccaatccaaagttcagacaggatatttaaggaccacagttttaatttttttttttttaaagataaggctgcaaagtccacaaatgcttataaaccagtgcctcaaccaatacttttatcttaaagaaaaaaaatcaattaggaggtcatttgagaaactagctgtttgcacctaattttaaatgtaaacaataaatagtataagaatgccaaacattttgtcaactgactatcctattgaaaaaaacaaacttgggagaaatgaaaccttagaaaaaatgatatccaatgaaatggtttctgaaagaaatcaagcataggcttacttagataaaaactattagcaacaatggtaatcatcatccagggtaaaaaaaaaaaaaaaaaaaaaactaataaaaatttgcaactttatatgcatatttagaattgcttgtagaaacgtttaaaaataagtttaaacctgaaccagaaaagaaaattttatcagatgagtcccttatattctaagaattcagcacaggccaataataatctaccaccatattgaaataagactttccaaagtcttatttaaatgtgctttaagatattatctttatttctgttttcaacaaaggtattatattgcccttaagagataatgccactaatgaagtgaagaaaaatgaagcatgacttttcatcacttctaatgttgagttcagtgggtactttctgagaattatagaatgttctacacaaggccatctagacctccctaattttgccttattcaaagagattagtatttttgcattcttaccttttcactgaaacactcaagcaagtcttggacataccctcgcatttcttgcaaaaatttataccgttcaccaatacccccagaagacccttctaatctttcaatagccctggtagagtccactcggctttgcagatgtttctcatgctgctgtcgatttgttttgtgcaattctttcatggagtccaaccttaggaacacaaaaggataaatataacacatttacatccaaaggtctatggtgtcaggactcttgcaatattaaaatatgcatttagctccactattagaacataaaaatatttggaatggcatcttttcctctgtactgctttttttctcaaaaaacaaaaaatggcagtttacagatttcacagttttgtgggctaaccaaaatctcactgttttgcttttccccccatagcgtgactacactttttcagagtccaagaggtacaaactcagaaatgtcttcaacaagatcatggagtggcattttttataatttttcgaggcttccacagaagtaatccaagaaggtagcagaacaaagtatgaagtcatcttctgtttagcttttgaagctgggccagtgaatcttctttgctgatattctgcatctgctaccccagactacatgttgcctgagggaacagaaagctagcggacaggtctttaagaagttgatctgccctacctgtctttaagctgtttctttaccaaatcaatagtaacgggagtcatctcattactgggagttttgaaagggactgtattatctgttttttgagatttggcatctgatgatccataggccgtataactataaggaatgccataggatgagccgtaaggcattgtctggtaagtgttctggtagtacatattcacttctgcgggttgactggcttgaacctagaaaagaaatgggatatagatgaaatctggtagttaaaactttgaaaataataatatgcctttagggttaaaaaatcaacagcaaaaattatacctatttgccaaatattatgtaataattgcagaattcttcaaaattagataaaagcaggattgaatgaatgtcctatctcttggtggaatcactaaatttatttctaataattttcagaaaaacagagttcagagttggaagaaacatcaaaaatcatttaaggccacctttgatcaatgaaagaggataaatgccttgcccatggtcacagaatcaatgggcaaccagagattagaatctaagactcctgacatccagtccaagactttctctattgtgccattttcttaacttcacccaaatgtatgcgaattctgcctcaaaacactattaacaaaaataggtttacgtttatgcaatttttctcactgtattacttacttttataaaacaaattgttataactgggaagatatttttcatcgatctcaagttttttgtattattgagaaatccatcttcttcaaaataattcttaaagtccaaaaaaataagctacacgcacaaaaacattccatttaaagcaatggttctcaaactttagtgtgcatcagaatcacctggagggcttgttcaacaaagattgctggccccaccaccccaagcttctgactctgtaggtctctgggggctgataatttggtaatttgcgtttctaatgagctaccgggtaatgctaatgctaactgaaggaccactttgagaaaaactcatctaagaaattggaaattcctccatcattctgactgcaaaaagccgaacacactgcagtttcttctaaaagcctacgtgtctctgtgtgcgtgcgtgcgtgtgtgtgtgtgtgtgtgtgtgtgtgtgtgtctcctcatgggattttgttacttgaaatgaatgacaaagattcaatacggaattttttactttaacaaaataaaaaaggctttttaatctacttttaatttttagtttaattcttttgtcgtacctgagggatattaattcctttccttatctgctcctgttcccatcggctgagctcttcatcctgttctccagttactaaagcatcatcatcactcccctcaattcctacagccatgagcaacaaagaaaagtaagtaacacccaaagagcaaagaggtaaaagatgctgtcctgacatttcacaagaactgagcaaaactattaactcaatcttactaaaatgtctaatatgatctcctctctcatttggtagtcctgactttgcctgttttaaacacagtattccttgaagctaaaggcagtattaatgtaatagttaaaatcttggatgtgtttcttaatctctgtaaacttgacatcaacaaagggaacaaaatctaatgcctcctaggaatatagaactatatgaatttacgcatgtaaactgctaagcacaataccagctgcacaataaatgttcaatgaacatgagttatcacaatgatattagtttttaaaaattccaataaaacacttgtacccaagaatagtcctctaacataaaatttagtaagtctaaatactttttacttgactataatatcaaatcacatttaatagcattagaggccatgcatggtggctcatgcctgtaatctcagcactttgggaggctgaggcatggtggcccatgcctgtaatcccagcactttgggaggctgaggcatggtggctcatgcctgtaatcccagcacttcgggaggccaaggcaggaggatctcttgaagccaagagttaagacaccagacacagtgagaccccataactacaaaaaaattaaaaataaaaaaattagccaggtgtggtgacgcacacctgtagtcccagctactcgagaggctgagacaagggtgactgtttgagtccacgagtcaagacactgcagtgagctatgattgtaccactgcactctggcctaagtgatggaatgacaccctgccttaaaacaaacaaaaaaaggcaatgcaataggcttactattcaattaaatcaagttacctatttcctcagcaattttttgtctttgtgacttttctttcacagaaaaaactatccggcgtttctcatcgtcatcttcatcatcactggcatcattctcatcttctctaacaaggcggcctttaccaggctcattatcatgaggagtgaaatctcccaattctcgggccatttggcgctttttccttgcagcatgtataaaagctgcatctggaatttctcctagaaacaaatggtaagaatatggcagtatgagagatgcaaagtttctattttcttgaaaatatgaagggtaaaataatccaagatagcctcatcacagtgatgtttcagctgctggcacctccttcccatactatgtctgcaatccaaaagattgttaattgagtttaaatggaatataaaagtcactgaggaaactaaaaagaacatataatggtaatatatatgggaaagagtgggacggggtaaaaaggaaaaacccaccaaagcagttttattttagctataattttttttttcatttttaacaaatagaagtggccgggcacagtggctcacacctgtaatcccagcactttgggaggctgaggcaggtggatcacctgaggtcaggagttcaagaccagcctggccaacatggtgaaaccccatctctacaaaaaattagccaggtgtggtggcgggcacctgtaatcccagctacttgggaggctaaggcaggagaatcgcttgaacccaggaggcagaggttgcagtgagccgagattgcaccactgcactccagcctgggcaacaagagcacaactccgtctcaaaaaaaaaaaaaaaaaaaagtaatgaaactgtattatgatgctggaaaacagataaaaataatataatctcatgaccctgaaaaggcactatatgatgtatagtacatttctcttgcagatagtttttagtttacctgtaatcatactaaatatttaattttgtacctatttctcatatcataataagttttattccatgttattgttctccataaacataatttttaatggtttaacattttctgcatagataaggcataatctaccgcacacattaactgaccttttgagtatagcaaaaattaatgcctccctacttgcctaattgttaacagttacataatatcctatcaagtaaatgtactgtaattttctaacaaacctttcccctcctgctagacattttttcctaaatgttgctcattgcaaatgttccaataaaaacatggtttccttgggataaatctctagatatgaaattactgggtcaagagtaagaacattttgaaatctattgattcatattgccaaagagcttcccataaggactgtaccaatcagactgccactagtgatgtatgtatagaatttactacaactttctcagcccagagtagcatatttttaaattgtataaacattaacaggagttaaatggtactgcttcataatttaaatctggctactaagcacttatttattcaaaggctgattagccagtggatagacctgcaaactattttttgcagaaaagtaaaaaggagtgtggacataaaactaacagaaattaggccgggtgcagtggctcacgcctgtaatcccagcactttgggaggccgaggcaggcggatcacctgagtttgggagttcaagacgagcctggccaacatggagaaaccccatctctactaaaaatacaaaaatcagctgggtatggtggtgcacgcctgttagtcccagctactcaggaggctgaggcaggagaatcgcttgaacctgggaggcggtgggtgcagtgagctgagatcgtgccattgcactccagcctgggcaacaaaagggaaactccgcctcaaaaagcaaaaaaaaaaaaaaaaaactaacagaaactagttttgcttttagcagcagttcagaagaaagttaagtcagtcttaatctgaaatacattaaaaaggactacaggaccatttttccatttacttgaagacttatttgcaaaatacaattacctgtctgtgaataaacttggaaaagttgggaaacttctggttctcctattttttatatttgcaaatggaaaaactccctcttcaaacagcaatgtcataataagaaacaccactcagctaattccttcttaataatcatctttaaagatggcccattcttgagggtttagtttagttctgagaaatacttttgagtacacacctggacgaagaacattcaatgaagataaagcatttgaaaaagctccaccagtctttggcttttcttcctctttttcactttccatatccatttcatcttcaccatgttcactgatgataactccatcttcttgatttgtatccttaacatgtcctgttttgtccaaaggttgttcacctaaatttttgaagaattaaaatatatgtaaaataaaattcataaattaagaaagtttattccaatggtattgacatcattaaaaatttttttaattaaaaaaaggggaacttttcattcaattatgggctcaatccagtaaagcttgaattaattgtttgttaaaaactcataactcttgagtgtgtgagtatgaaacagcataacagacaggattaggtaaaaataatacagaggatgtaataaaggatgcatttgaggccctgctccattccaccttcagttaattttatcaaaatgtcaacaatttatcaaaattaactgttttttctgctaaactcccacaaggaactgcttgtacctctttcaagcattacttcattttatgttagtatttcattaaaccctaagcccatgcgaggcaactctgttatgaacaaagcacatttacagtccagctaagtctcttagtaatggacacttacatggaataccttcttagctcaaaaccacttgtcacctatcacctaaagagatgagatcccagcagtcacatttacactgtgcaagcctgaccccactaccacgactcaatgtttaagagtggacttctgactgaagcagagataaccagattctctttctgggaatctggaatcaggactgaaactaaaggctacatgaatatgtaaactaggaagggagctgaggaatggccacattgtgccatctggacagagaagagagcctcctaattctcagttctaatccactcctgaggcccatttcaagattgctttcctgccattgtcatccaggaggcaccactacatcttaatgataaactgtcctggtttacattacttacaattaaataatcctaatacagcctctgtcccaggcaaaaatcgaagtgcttcaccttgaagcactgaacctggtaatgctcacaacaggcacaaggaatatactgaaagagtaaagcaaaagtttattctcaatatgaaagatatttttctgtcatttccttagaatgttcctgtccccaaaactgcttcaaacttcttccttcttctcaaaccatactgtactcccttaagtaacagtcccagagataacatccctcccctctttttaactttaccaagaagattttaggtaacctcttttaggctctttcattttttttctttttttttttcatttaccattttctcattacccagacttccctctgaaatggattatgaagctataaggttttaaaactcactttatcacattattagatggagtaaaaactacctatttccttttgctctaaacccatgctaggccaggcatggtggctcacgcctgtaatcccctgggaggccaaggcgggtggatcacctgagatcaggagttcaagaccagccaggccaatatggtaagaccctgtctctactaaacatacaaaaattagctgggcttggtggcgcacacctgtagtcccagctactcaggaggctgaggcaggagaatcgcttgaacccaggaggcagaagctgcagtgaggtgaaatcgccccactgcactccagcctgagcaacagaacgagattccacctcaaaaacaaaacaaatttacccatgctaaaccaatggctgttaatggactaaaaacaaaagcacaaaaggtctactacatcagatatgctcagataatgaatgattcctacaaattttaggattcaatgtttcattaaattcacaagtatttgcttatgattgagcaaacacaagccgaaagcatggtgatatgtgaatgtcagtggtcacatgttacccttccagacatctctatatagatgttaaataacctttttcaaggctccactcatgccttcaatttcatttactactacttcaggaaacctgctcacaattattacccacttcaccttaaacctggtcaggctctccctctcctcttctacaaagagggacaggcttctcttcatcaaaagagctttcccacttgactccattggtccctctagttattgcctagtctctctctgccaaacttcccaaggaagcagtgtggacctgctgccctctacttcctctccaacttttgtgccttgaccctacaaacagcctttgatttcacccaacctaacccaatggctgcagccacggctaattcatatatgatagcatcatcaagcaatttagcaaaagatgttccttcttccaaacatctctgagggcactgggtctggctggtgggccactcccatccatcctgtcagaagccctcaagagaaacgctgggcaatcttgccaatagcccctccttggtcctcacttttcctgacttttcttgtactagttcacacaagcgaccatcatcttcctgaaacattcttctcttttcctctttggccttcctgattcttttatctctttggtaaatcccttcctctacatgtaggcttactagagtagaagtctttggtcttcaggaatttttcctttatatacggctccctcatcaattccattcacctttaattatcaccgcaataagcaccacccccaaatctacatctctaggtattcactgactacttccactcaaattcaaattaaaaagagaactcattattttaagaatatcagaaaaatggggttctcaagtcaataccgtggttattttgaagttaattgtctctgcctactatagagggttgaaggtaggaagagttctggattgccaattaatgacagaccttcatttcagtgttaccaatgacaacctacaatacaatcagactccgccttcagaggacattaattggagttatctagtgagtggagtatcagaattcaatgaggatagaaggatggaagaggtcagagatggcttcatcaacttcacacttgtttcaatttctaaacccaacaataaatggcaactaatatggtttgactatgtctccatccaaatgtcaacttgaattttatctcccagaattcctacgtgttgtggaagggacccaggaggaggtaactaaatcatgggggctggtctttcccgtgccattctcatgacagtgaataagtctcacgagatctgatgggtttatcaggggtttccgcttttgcttcctcctcattttctcttgctgccgccatgtaaaaagtgcctttcacctcctgccatgattctgaggcctccgcagccacgtggaactgtaagtccaattaaacctctttttcttcccagtcttgggtatgtctttatcagcagcatgaaaacagacttaatacaacaaccatgacaacaggcctttctcagttgtcacttatcctgacctttcttttactctcatcatatatagttggtctcaagaattctgaggaaaataaggcagtttcctagactccaaaataaccagttctcctaaaaacattcctccttccacttgccttctctattcctatatataattattcataaccaagacaccctatggtttgagtgtcctctccaaaactcatgttgaaatttaattgccattgtaacgttattaacaggtggggcccttaaatggcagttacaacatgagaaggtgaatgccattatcccaggctcctgataaaaggatgagtttggcaggatattctctctctgtcttggagactcacctgcccttctaccatgttatgacaacataaaggcccttagtagatgcctgtgccatgctcttggccctcccagactccagaactgtcaaccaaataaacttctattgtttataaattacctagtctgtagtattgttacaggagcagaaaatggattaagacactccaggacaaaagttcaaatttgactctttcttttaaatccaatatggcaaagtgtatattaagcctatcaattcttcccttggaatggttctcaaatcattctttctttccacttctccccctaaaacaacagaaaacatttttaactcatccagaatttcctactaaatcagtagaagcctttactcttgctcaactgtgagacctttttaaacccactattaatggatcaaagctggcccttgagtttaaactgctttaggcctccaatctctcctcatgctgcatgttaataccaggctaaagtttcaaaacgcatttatcatgtcaccatcttggcaagccactgtagcaaatgtaaacccttactggatactgaacatccttcacaatctgtcaacgtatctttcacatgaaacttctaactacttccttcacaaatcatctactctgacctgtcaggtgtacttgttcttttccaaaacagctttagtcattttaatccttgatcatacccccaataccttccctttcggaattttaactatcaaagatccatcttcgagtcccactttttccataaagcagtcctctctcctctgaaagagtagccaccctttggaacactgattgaacattttgccaaacactgagtcctcttacacatttatgagatattgtcttcacatctagattgtaaatttgagatacaaagccatactttttcacaataagcctgtaagtgagaatctggaaaatcatgattttctcattaattccataaaataaaatagcatttgcaggagaataactcagaccatagaatattatactggatccactttcctaaagacaaaataaccgcttaaaattttttaaactgaggttttgagagacgtaagagatgtctgtacaatatacctgcctcattattctaaggagtcttcatctagtatcagataaggctgctgaatgggagtaatactaatattaaatttagggcattcctaaaagttctctaagaataaaatccactgtggaaataccaccaaagaaatcgcaaatctgtctctacaaaatacaagaatttgcacaacactccttcaaacagaaataaacctgtgtcttaggctaaaatgagaaaccttctttctctgttcaacagcagtctgcacacaagtaggaaaactgtgagagaatctagtcattgcagcagaaatgttccagtggcaacaattctgtcttcttataaaatacatttacaaagcatctgtgttacaattaaataacagaactgtactgctactcaataagggcccttgacaaccacagggtccactgaatgagttcagaagatatacagcaaatcactgtgagaaagagctttcattttgtcatttcaaaagaattcaattagtttggtacttactttcagctgatgagttgagttctgtcttaatcttcgatttttcaagatcttctttatattccttcttgagcaattttactatctttttgctataacttgatttcttcactttgaaaacttcttcattttcttaaaaaggaaattaaatgaagtctgtagcaactattttctgaaaatattttcccttctttcacatgatcttacgtgctgtccaaattatcccaaatatatatactcatatgccaaaatcattgtataattatttcaagtctgtcacagactcaaaaacagaggtcaacttcctaaattactgtgaagtaatgagatttttgagactttttaaaggaatagcacatgtaacttcacaaaattttcctattattgtcgtccttaaatcatctatttgagaggggaaaaaatcattcaaaatgtttctgaaaaaccacatcaccaagttattaacgaatccgaaacaaaatatctaaaataaaaaggtgctgtcaattctgagtaactacatccaccacaagctgacatagtggttttaaagctaaggtaagggcaaatcacttttctttgatttgaaattttaaaagtactaaatacttaaaaaaaaatagctcatgtatctcaaaaacaaaaatctgtctgtactcctctcaaaccaaataaagagtaacagaaatgccaaagataaactacctaccttactggaaacctctcgaataaaaatgcaagatttacaaaacttaatttcttttttcgtaacatggaattaactgggttatgcacattcaaatggtcagaagaaaagatttaaggctcatttaagatcagcaatctaaaaccactgcagcctggcctcccacaggaattggagaaactaccttgcttttactatttttacaccgtctcgcttcactgttcccaaagtcagtgcgaagaaggctgggtatctgctacccctaattacttttatgggtaaactgaggctcagcgactgcaagggactggcccaaggtcactcagaaccagagctgcaactccaggcttctgttccctctcctagtattcctttttacaaactcggccttcatggtcgaggatgcctggacagagcatccaagaagtgtgggcgcagtgacctgcagagggctcggaaagcatgccaagagcagccaggggacccacaccaagttggccctgaaacacgccaggcagaaaagaggcaggacagggaacaccgaatttcccctgaaacactctgaatgcctgatctgagctccggccccgtggcagaggaggtggttaagaaaaggctgggggcagcgcgggaacgcgtcccttgcccgagcagaaggccggaggctggggaagattcgcagccggtcggacggcaggggactccgttccagggctccggggctgggcgtccagagaatacgggggcgggggacgggggcctgcgtcggggatgcggccgtctaagggcgtccgaagcgcgcactttaccttcctcctcgtcctggaagctgagcaggctggcccggggcacctctttgttctcgcgaggcctcttgcgcggcttcagcccgttgccgggctccgcgccgccggggaagccgcccccggcctcagccccgaggcccggggtcagcgcggaaggcggcgacggccccgggcccagcagcgactccccgccaggggccctgtcgccgccaccggggcccgcctcttcgcccgtgcccggcggcggcaacaacggcggcggctcctgctcctcatcgcgttcccgctcttcctcttcggagtcgttccgcttgcgcacgttcacccgccgggcctttcggaacatccccgcggcccgcacggcggtcgaatactcgcttccacaccgcggccccggcagcgccgagctcgtgacggcgcacgcgcgctctccggagctccagccgggtcgagtcctctgttgctaccgcgcaccccacgagcgcgcatgcgcctatgctcccacgcgctctcaatacttggagaaagagagagagtgagagagagagagagagagagagagagagagagagagagagagagagagagagagagagagagagagagagagagagagagagagagagcgagagagagagagagagagagagcgagagagagagagagagccccacacctctcgcgagagcgtcggctctttgcatcgctctctgtcggagtggagtactattagcatggaactctggtgttgtttgacaggtcacaaagaggatcatagagatgagaagaaagagtaggctctgttgtccctcagacggcgctgctgcagtgcgtcttcgcacttacgcggagcggtaatgtgaggaagcctcccgccaaacagatgagggaggaggaggaggggagaggccagagagagaagcggctttcgggaaggaaagtgtgatctagtaggtggaatagtcctctccaaactttgacctgaggtgtgactattggtaattactagttattcttgagtaatactttgtatttctacagctttatagctacagagctcttagaaagacattgaattttatttatgatacaatgttacttcaaagacattgaatttcatttatggtacaatgttacttcaaagacattgaatttcagttatgatacaatgttacctggcttgatgtcccccgttccccagtctttcaggaacaaggaaagcaaaagtgtttccgtgttttctaaagaatgccaagtttgcaagcaattctatgactaaatactttccaaagcttagtgagtttcagaaacaagtggaaggaaaatagagcagggggtggggaaggttgtgacagttctcagacttgcgtgacaaagccctcgctggccacaccttcacagggtgattgcgcctaaggttgaactcaccggctttccctatctcatcaccgaactagaagtttttccttcgggcatgcacctgtgcatgcgaattcattttgatgtttcgaaattaaaagggtattcggtagagtgaaaaaaatccacccatgtctggaaggctgttcacttcctcagtggcaatgttaacagtttcttatgatcctctaaagatgttccatgaacataaaagcaaataaatatgcatattttaatgtgttcccctttttacacagatggtgtgtaagctgcatttttagcctaccgtagattggagatcggcccatatctgtatatgaagggttgtgtttttttggttttttgtttgtttgttttgagactaaatttcgctcttgtcgcccaggctagagtgcaatggcgcgatctccgctcactgcaatctccgcctcccaggttcaagtgattcttctgcctcagcctccctagtagctgggattacaggcacgtgccaccacgcccagctaatttattttgtatttttgtatttcactctgttggccaggatgatctcaatctcttgacttcgtgatccgcccgcctcagtctcccaaagtgctgggattacaggcgtgagccaccgcgcacggccgtctatttttttttttaacccacctgcgtagtgattcattgttgggatataccgtaatttatttaaccagttccataaacattgatatttagattatttctagtcttaatcagtgctgtaatgaaaagctttgaaaaactgttacatctgtaggatgaaatagaattgaaattgctagatctcaatatatgcatttatgattttgctaattctaaatttctttttatagaagttatgcagtttgcacttatatcagcaaacattaggatgcctgtttgcccacaccatcctgtagaaatttcagtaagatttaaattccaggttgaagtggaagatcccgagcactccaagcatttctttttattttatttatttatttatttattatttgtttgagacggagtcttgctctatggcccagactggagtgcggtggcacgatctcagctcactgcaacttctgtctcccatgttcaagctattgtcatgtctcagcctcccgggtagctgggattacaggcatctggcaccacacccggctaatttttgtatttttgttttgttttgttttgttttttaagacggagtcttgctcttctcgcccaggctggagtacaatggcacgatctcagctcactgcaacctctgcctcctgtgttcaaacgattctcttgcctcagcctcccgagtagctgggattacaggcacctggcaccacacctggctaatttttgtatttttagtagagacggggttttgccacgttggccaggctggtctcaaacttctgaccttgtgatccgcctgcctcggccttctgaagtgctgggattaaggcatgagccaccacacccggcctaatttttatatttttaattagatttgacatgtgcacaactaggactcagttttggagctaagagcatcctctataacattaacattttcttctagttaataggaagggttaataacatctggcttccattctacttatgttactctcagttcttatattctggctgttcagcattggtgtaagttctgattccaacagtgtttcactagtgaaattgaactcccttttctaatcatagaagattcaaattgtgcctgatcagcctccagacacctgagccaagagaaagatttgcagtaaaataattagggtagaggtagcaaagacaaggtccagaagccaaatatgttattatggtggcctgaaatttcaaaaatttctcccagtgtaaaagtggtgattggatatggatagagggaagagtacctctcattttaaagtaagccacaatacaatcacttgtcacttgacggggatacattctgagaaatatgccattaggcaatttcatcacatacttacacaaacctagtggtgtagcctactacatacctaggctgtatggcatagcttattgcttctaggctacaaacctatacggcatgttactgtactgaatactgtagcacttgtaacacaatggtatctgtatctaaacatagaaaagatacagtaaaaatacagcataaaagctttaaaaatggtgcacctgtataggacacttaccaggaatggagcttacaggactggaggttgctctgggtgagtcagtgagtgagtggtaagtgaatatgaaggcctaggttattactgtacactgctgtagattttataaacaactgtacacttaggctacactaaatgtttaaacatatttctttcttcaataataaatagcttactataacttttttactttataagctttcttattttttaaaacttttttgttgttattgttttgttttgtttttgttttttgagatggagtctcactctgtcacccagtctggagtgcagtggcgcgatctcagctcactgcaacctccacctcccaggttcaagcaatgagacagagtctcactctatccccaggctggagtgcagtggcgtgatctcagctcactgcaacctctgcctcccaggttcaagcaatcctcccacctcagcttcccaagtagctgggattataagcgtgcaccaccatgcccagttaatgtttgtatttttagtagagatgatccgcacaccccacaagctcctgtgttggccaggctggtcttgaactcctgacctcaagtaatctgcccacctcggcctcccaaagttctgggattgcaggcatgagccaacgtgcccagacattttttaaaacttcttgacttttttttttttttttttgagacagagttttgctcttgttgcccaggctggagtgcagtagtgcaacctcagctcaccgcaacctctgcatccagggttcaagaagttctcctgcctcagcctcctgagtagccgggattacaggcatgcaccaccacgcccaactaattttgtatttttagtaaagacaaggtttctccatgttggtcaaggcagtcgcaaactcccgacctcaggtcgtccacctgcctcagcctcccaaagtattgggattacaggcgtgagccatcgtgcccggcataacactttgcttaaaaaaatacacatttacagctgcacaaaaatatcttctatttttaccattttaattattttgttttactttttaaactttaaagctaagacacaaacacacacatcagcctaggcctacgcaaggtcaggattatcagtgtcactgtcttccacttccacatcttgtcccactggaaggtcttcaggaaaaataacaaacatggagctatcatgtcctataaaaacaatatctttttctggaatacctcctgaaggacctgcctgaggctcttatatacttaacttttttttttgtaagtaaaaagagtgcgctctaaaataacagtaaaaagtatagtataggcgtccccaaccacctcccacccctgcaggaggcaagtggccaaaggtagacattgttctctctctttttttaagtttatttttaaaatgttagaagccacaaagccaataaatatgtaaaaaatattctatatacattagctgatgtcttagtccatttgggctgctacaacaaaataccattaattgggtgacttataaacaacaaatttatttctcacagctctggatgctgggaaatccaaggttaaggcactggcagatttgtgttccggtgagggtctgcttcctggttcatagatggtaccttctagctgagtcctcacatggtggaagggagacaactgtggtttcttcagcttcttaccagggcactaatcccattcataagggctccacctttgtgacctagtcacattccagcatctctacctcctctgctatcacactggggattagtgtttcaatatatacatttggggggaagataaatagctgggccttaacaactgatgaggcctcactaaatatgcgagaaataagataaagcaggggtccccaacctccaggccacagactggtaccagtcagtggcctgttaggaaccgagctgcacaagaggaggtgagcggcgggtgagcaaacaaagcttcatctgtatttgcagccactctgcatcactcgcattaccacctgagctctgtctcctgtcagatctgcagcagcattggattcttacaggaacacgaaccctattgtgaactctgcacatgagggatctagcttgtgcactccttatgagaatctaatgcctgatgacctgtcactgtctcccatcacccccagatgggaccatctggttgcaggaaaacaagctgagggctccaactgattctacattatggtgaattgtataattatttcattatatattacaatgtaattgtaatagaaataaagtacacagtaaatgtaatgcatttgaatcatcctcaaaccatcctccaccccctagttcatggaaaaattgtcttctatgaaaccagtccctggtgtcaaaaaggttggggactactggtatagcaaatacataaaccagtaacatagtcatttattatcattatggagttttatgtggtatatgtaattgtatgtgctatacttttataccactgaaacagaggtttcttaataccagcatcaccacacacatgagtaatgtattgtgctacagtattatgattgctatgatgtcactagatgataggaatttttcagctccattgcaatctttttttttttttttttttgaaacagagtgtagctctgttgcccaggctagagtgcagtggtgcaatctctgcctccaagttcaagcgattcttgtgcctcagcctcctgaggagctgggattacaggcacgtgccaccacacatgactatttttggaatttttagtagagacgagctttcaccatttggccaagctggtctcgaactcctgacctcaggtcatccgcctgcctcaccctcccaaagtgctgagattactggcatgagccacggcgcctggccgcattgcaatcttatgggaccaccaccatatatgcagtccatcattgatcaaaacatcattatgcagtgcatggttgtattcagatacaacagatttatttataactttgccagtctacctatttatatagttaaagagcaaagttaaacatttaaaagttatcttactgcccaagcaagccaaaggttcttctatcagaagttatagagattgtggaaattaaattcctgaaattgaatagctaccttaactgcctgtcagctggtatattatcagaaactaattacttgataaagtacttctgtactttgagtatcaaatatactaatttgtttgttgatatagtatgtcatcaccatttaatattgcaatgcttttagtatcctgggaagacaaagaactaatacatcaaccattttgtttcaatcaataaattgttcctttaaaaaaagtcatctttccaagcaataattctggttagtatttttcccatgaaattgtgactttacatggattaattgacacacagattcagacaaaataggcaataagcagtttggtttgccaactcagtcctaaaccatgcagtctggaacaatgactaccaaattcaggtctgtgaacttgtgaaaagttttccctactcagctgccaaaataaaagaggaaggacagtctgtgtgtatagagtaaccagatgtcctttcttggaagaaatagtcctttattctgaaattatgtgcctttttttctctttcatgttaagatgagaaaatttctttatttctataaacaatgatgctaatatatggtagtctgtgagtttatcttcatacccttacttggaaaactgaaatgtagtaaaagctataggccctcctcaattttttattttatctttaaaaaattttatctggtaggtgaaatataacagcctaggagtccctgatctaggattttcctttttttaaaaaaactataactctggacatctcaataattctattctggaaaaaggctgaagaaataatgtaataattttttagattgatttagaccttactttgatgaaggcagttctgcagtaacttaaagtagaatgtcaactcatgggtgccacggtttgaatgtatcccccaaaattcatgtgttggaaacttaattcccaatgtaacaatgttgagaggtgagacattaagacattaggtcatgaagggtctgccctcatgaatggattcatgtggtggtcgctggattagtgggttagttatcttgggattggcttcctcataaaatgcatgagtccagccccctttctgtcttgctctcttgtactctcttcccctgtcacgtactgccgtggtatgtggtgcagcaagaaggccttcaccagatgtggcccctcaaccttgaactttccagcttccaaaacgataagaactaaatttctgttctttataaattatctaagctgtggtattttgttatagcaacacaaaatgtactaagacaataggggaagagatttttatgttttgttcactgctgttttcacagtatgttcaatggctcttggcacagaatagacaatattcgttgactgaatgctattggacattatctgtttattgaattagtgataaatattttaccctacgttgatataaatggacatattctacaggtaacaaccctttatttctaaagcatgatctcaatgtattataaattactgaagtagattagttcttttctttttttttttttgagacggagtctcgctgtgtcacccaggttggagtgcagtggcgtgatctcgtttcactgcaacctccgcctcccaggttcaagtgattctcccgcctcagcctcccgagtagctgggattacaggcatacaccacccgcccagcgaatgtttgtagagacggggtctcgctgtgttgccaggctggtcattaactcctgacctcaggtgatccacccacctcggcctcccaaagtgctgggattacaggcgtgaaccacctcgcccggccgattagttcttaaagtagtaatagacatctcccctccacctttgggaactgcctcctctagggagaagagtaccccgtgagttaggaagccaggtgatatggtttgaatatttgttctctccaaatctcacgtggcaatgtgacctcctgtgttggaggtagggcctggtgagaggtgtttggatcatggggcagatgcctcctgaatggcttggtgtcatcctgtaacaagtgtattcttgccctatttgttcccatgagaacctactgtttaaaagagtctggtacttcctcttctcgctctctctctctctcgcttctgtctcaccatgtgacatgctggctttccttcaccttctgccatgagtagaaggttcctggggccctcaccagaaaaaaatgctggtgccatgcttcttgtacagcctgtgggaccatgagccaaataaacctcttttctttataaattaccctagcctcaggtatttctttgtatcaacaacaacaacaagggcacacacccaaaaagaaaaaaaaaaaaaaaagaaatggactaagacaccaagttacattgtactggctgatgcaaagtgggctgatcagaatctcccgagattttgcccttgaaacagagacagtgagtccctgcttatggctggaattgcaatgaactcaaaagcagtaggaaagccttaaattacatgtcaactcaggagccaagaaaactagtcaatgtagcgagagagaagaatgaggacagaaaggatactctgagggcttctggtaccttcccaggtccttgactcttccagaagctggactgcacgccatgtgtgagttcccttgatcttcttggaatccttataataaatttcctttttgttattgttggtattaatgatgttttattgtgttacgtatatttgcttaaagagttattttcattttatagtagggtaaattttatctgtgtaccttatacaattgtttttaaaagttcacttgcttaataactcttcacctatagcttttgttcaacagagtttttctcttatttctttctttttaaaaactatgcacacatacatcctcacaagcaggcatttaagcagcaagtaacagtgaggaatgctctctctcctgcaggcacatagttattgcaagtaacttgctaatagagataagtacctctgtttagagcatataaatggtcctagttaaaattgttagtaaatttatactttgtatcaaactctattaaaatgtagccattggttctaattgaatgagatcattgtttctactaaaactttgactcaatccaggtttaaaagaccccaaggttttatttatttatttttttaaataaagttgttactttaaaaattattggccacattagtatccccagtggagattcaactcttataaatgtattccactcatgagtgttttggcaattcagctataatggtcatttcttcattttccaaaatgacactttcttcaaccaaaagaaagtgaaatttctctttatccaaactaaggccttcaccagatgtgacccctcaaccttggaacaaaagtaaatgttttaatgaaggttaccttgttcatcctagtttatttttaagatgtatcttctatttagaccaggtatttctcttacccattcattcaacaaaatttattgaacatgtttgatgctctaggcattgtgctaggcagtagggacacaacagtgaataagacagatgttttctttgtcctagaactgtagtcagctgctagagatgtaaaaagtcaataaacaaattaattgctaattgtgattataattgtgaacgaaatcaatagggtactacatcttaagaactgatataaaatgatagaaatttcagtttgagtttattttttctatgtgctgtaggggacaggaaacattctctttaccctctgaaggactgaagtaaatagatagtagacagagtaacaggaaaaaaaggcacacaaatttattatatgcacaggggcatcataggaaaaagtgagtaccctataaccgaatgatattgagaagcttatataccttcttcaaaggggagagacagggaaggatgtaggcagcttaaggttgagaaaataatttggggaaaagatgaataggtgttagagcctgtgccaagtctctctgggcatgatgttgaccttcagtctcttctcttgggttgcagttgatcttccttggttgaagagattcctggggaggagactcatgacaattgagtttctttttggaggatctatctttaggcaggtatgagaagttcagagagcctctccctgtgctttgggaaagaaagaggggccagagacaggagggcaggagaaggtcagagagaccctggttctgaggctccttctgtggttttccaatctcctttagttcaaagtactcagcatgctaaagtggcatgctttgtggtattgtgagccctaacagtgccaatggccagttaagtatctttatcattagaaaatgtgtaaggactttgggggctgaggcagaacattttcctgcaagataattacaatgaacagctccaaggtgtcttcagtagtaaacttttcttcaaacatttcatgtaaaatgggcatttgaaatcattttgttcagttcagtattttatatcttctagtgttactatgtgaaagagtattattcagaaccatagtagaacaagatatttatattacattcacaatggacactttatatctgagaatagtgtgaccaatgaaaaagcaaaaataccaatctatgcaccctttctgaaagaacccgcttaccacctgttgggtcagtatcattcatacattattgtgcctcttgaaaaaaatttgaagcagatatattatggaagacgacagttataaacatgctctctgggtataaaggatagaagaattgatgtttctttttttctgtattgtttagtgttactagagggcagcaaagtcatacaataaacatacagtaagcttagactatgattacctaacagaatcagatgcagctttgaatttgttaaaaactacagatggactttgaaaagtaactttttcctaattataaaagtactgcttgcacattttagaaattcagaaaatgcaaaacaatacaaagaagaaaatgagaataacttataaactaatcatatggtttaaatcttaaaaggtattaaatgttaatttttggttcattcccttcctgattgcttgtgtttagtcattctctgctcaaaacacctagactgttttctgttttctgcacagatacagcatctatttatctacagtaatgttctctgtgttttttaactaaatggtatcatgctctatgtgttattttataacttgctttttccttttagcttgggatttgcagctcttttaagtatgtttaaatatacttcattcattttcccaactttttattttggaaaaattcaaatgataaaaacaagcagggccgggtgcggtggctcatgcctataatccctgcactttgggagaccgaggcgggcggatcatgaggtcaggagttcgagaccagcctggccaacatggtgaaaccccgtctctactaaaaatacaaaaaagttagctgggtgtggtggtgcatgcctgtaatcccagctacttgggaggctgaggcaggagaatcgcttgaacccaggaggcagaggttgcagtgagccgagatcgtaccattgcactccagcctggtcgacagagcaagactccgtctcggggtaaaaaccaaaaaacaaaacacaagcaggaggctggcatggtagctcacgcctgtaatcccagcaccttggcaggtccaggcaggaagatttcttgaggccaggagatcgagactagcctgggcaatatagctagaccccatcactataaaaaattaaaaataaaaaaattagctgggtatggtggcacacacatatagtcccagcgactcaagaatcacttgagtccaggaattagatgttacagtgaactgtgatcgcactactgcactgcttcctgggcaacagagaaagaccctctctcaacacaccaacacacataacagcaagaataatacaacgattacccacatatccttcacctagattcatcactgttaatattttgctacatttgctttctctctttatctttgctgagtcatttcaaagttacctgcagacatcctgatactgcagccctaaatacttcagtgagtatcccctaagaacaagggcatttctctacatacccataatacagttatcacactcaggaagttttacattaacatactactgttatctaacatcgagtccatattcaaaattccctcacttatcccaataatgtctttcatagctgttgttttatccccaatctgggatctcgtaaagattgtgcattgcatttagttgtcatgggtatttagtctcctttattctagaacagtctatccgttctttttttcttcttttaactttcattgactcttttttattttttattttttgagacggagtctcgctctgtcacccaggctggactgcagtggcaagatctcggctcactgcaaccttcacctcccaggttgaagcaattttcctgcctcagcctcccaggtagctggaattacaggcatgcaccaccatgcccggctgatttttggtatttttagtagagacggggtttcgctatgttggcaaggctggtctcgagctcctgacctcaggtgatccacccaccttgtcctgggattacaggtgtgagccaccacgcctggccaacactgacatttttgaagcgtcctcatcagtttttttttttttcttctccagaatgaccctctatttggatttggattacacaaagtttaacgttttttggaaaaatcctacctaggtaatgtgtagttctcaatgcatcatgtcaggcagcttatgatgccaatttgtcccatggtaagttttttttttttatctctatgggtgcatagtaggtgtatgtgtttgcggggtacatgagatgttttgatacaggtatgcaatgtgatcatggagacacatggggtatccattcccacaagcatttatcatttgtgttacaaacaatccaattacactcttttagttattttaaaatgtacaattcagttattggctatggtcacccctggtaagtttaatcactcagttatggacctttctccattgtaaaggtcctacttgtagttaataagtaatctgtggaatgatgataattttagactgtgtaaatattcctcagaatttcaaccaatcattttagcatccattaatgattcttttcagaattcatgattactatagcatttgcaaaatggtaatttggtattactctctattactccttctaaatttattagttgccaatgttctgtaaatcagactttctcttcttctttcccactttttatttttttactttttttagtgacagtacagactcatggagtctttttcaaatcaatatgctaaaatccatttctgtaattgatcgttttgatgttcatattgtccctaatttggccagtagaactgtctgcgatgggttctgcattctcttgctacatctccatcaactttttgaccttatcttactttctgtcacagtaagatgtttcaagctcactttatgtttttgtttctccagacccctggaatcagccatttcttcaaaaccctattttttgtttgtttgtttgttttaatggggaatggtgttgagaaaccacaatttaggtgtcaggtgtgttctttgccacaggggtgtcattgcttctaggctttctcagaggataaagctaagacatatgtcttaaaaagcatgagtttggccaggtgtagtggctcacacctgtaatcccagcacaacaagggaggattgcttgagcctacgagttcgagacctgcctgggcaacatagtgagaccttgtctctacaagtaattaaaaaaattagccaggcataatggcatacatctgtagtcccagctacttgggaggctgaggtgggaggattgcttgagcccaggaggtcgagactgcagtgagctattatcataccactgcagcactccatgctgggtgacagagcaacaccctgtctcaaaaaaaaagaaaaaaaaagtgatgagtttgcactgatacctttaattccaatccaacatcccaggcttctgctccttccctcacttcatatttcctaccattacaactctggatggacctccaaaaatttgagtgtatttactcttttgcacaatcctacaaagtggttttagaattgttgtaccaatattatcaccaccaacaagcctactaaagtttataatttctttgcatttttaaaaactaacagtgttttatttctttcataaaaaatcttaaatgtggcaaaatgttcatatttgtcaattctggatgataattacatgagtgttagtcatattattcattcttttctttttaaaaaattcttattgaagtatagaatgcatacagaaaagtgcatttattgtacatgaagagctaaatgaatttttactaactggcatatgtgtatgtgtgtgtgtggggtgcttctctatgtagatatacaaaaatataaatgttgttttctagcttgtgtaaattttaagacacattcctaaattgtacttcaaagtgactgtaccagtttattctcttaaatagagactatttgcctacaggcatgacaaaatggaatatcaaataactttactttttgccaatctagtggatgaaatattagtttcctgttgcatttctctgggtagaggtaatttttttgttgttcagttattggctacttgttttcatcttaaagtgaattgcatgcttatttcatcgtttttctattagattgttagtctctttgttttctactttaatactatctaatttaacattatgagatttgtcttggggtaagactgtaactttaagcagtaagcacttgttccagcatcatttgtttatttatgtaaaaatgggctgggcatggtagttcatgcactttgtaatctcagcactgcgggaggctggggcgggtggatcgcttgagtccaggagtttaaaaccaacctgggcaacatggcaagactcagtctctccaaaattgcaaaattagccagacgtggtggtgtgcacctgtagtcccaactactcaagaggcctaggtggaaggaccgcttgagcccaggaggcagaggttgcagtgagccaagattacggcactgcactctagcctgggtgacagagtgagaccttgtctcaaaaaaataaaaataaaatatgtatgtagaaatgctcttattgggttttctctattatgaaagtgattttgtgtgttttaaattttatttgtataaacttatggggcataagtgcaattttgttacatggatatattacataatggtgaagtcagggtttttcgtgtgtccatcactggaataatgtaccttgtgtccattaagtaatttctcatcatctactccctgctctttcaagtcttgattatatgtttattcaaaaaataaatatatctcccagtaaataaatatttctcccagataggtagaaaataagaattgcccccataccatcaccacatatgatactgtttttagtgtgcgtcctagtctgttttttattttttgttgttgttttgtgtgtgtgtgcttctaacaccctcaattgacttaatttccctttccattttttttaatgattttactattagcaagtacttttttttttttttttagtttaggatctgtctttgaggcatccttcctgctgtatttgtctatctatggtgccatttatattgtcttacaattgtctttaggagaaatgtactctctgtagagccagctctccctcattgctttcctagagtctgggtaggataaacatgaccttgtgcaacattttgagttgtgactctgtattagtttgttctcacactgctaataaagacacacatgagactgggtaatgtataaaggaaagaggtttaattgactcacagttccacatggctgaggaggcatcacaatcatggctgaaggtgaatgaggagcaaagtcacgtcttatatggtggcaggcaagagtgtgtgtgcaggggaactccccttaataaaaccatcagatcttataagaactcactatcatgagaacagcatgggaaagacccactcccatgattcaattacctctcaccaggtacctcccacaacctgtgggaattgtgggagctacaattcaagatgagatttgggtgtggcacagccaaaccatatcagactctgttaaatgaaaaagcctccgtacatcattattcttgtaacaaatcacatccaatttacaagtgttctgtaaattctggagaaacagaggccctgaagttattcgtgagcaagtctgggaaatggaaatggaggttccaattcctgtttttactaatttaatgtgtataaaatgttatctatatcttttcttcattcctttgttccttcctttcttttgagggactttcataggttcattcaagagttttaacccctaactcatttttctcacaaggccttaaattccacaacctcatcatctaccacctttggtgctttcagaatcatgactctcaatgttgaagaatgggctactgcatggaaggtgggtgcaaacccctaaaatttccacccctggttctggaaagtgagaaattggggatttcaatactgcaagccatccttcacattctaaactcattgtctttacttagttccgtcagcatttctttcttccagtcagtggggtattggcatggacttgtactggctcataagagctgattggtaagttttcaggaatttgcaagctggttgttaagcacagtcattattgaaagcaaattatgtaaacttacaattaaataaattatatcaaaaccaaaaataataaatactcagaacttatcacttcctaattattttacttcactttactattattcatgcttttggggttagttgtgcctgttgtataggtagggtggaaatactatataatgctgccctattgtatgtcttttctcaactccatgttctcttggtagcatgaaattgggttatggtggcagtatttacaccactacatatcagagtgtgatttatgattttgttgagtgtgatggagaaaatgttaacgatgcagattaaacttaaaagtgtgtcatgtccatagcccttacattgtgaatagtccccatacatgagaaaatattcctccagtatttgaaaactattatttgattcagcaaagaagttgctttcatcactgactagcaagtgacattctcacatatatctttgttgtttaactttcctcttacttctaacataaatgaaaatctcaaccaatatttataccaaaactatacatgctcatcagttgcaaccctaggttggctttgtgtacaagagtttggcaaaaatcaaagcattctttgagaactaatgatgtacaaagagtatataataaagagtaatctatagtttattatcatttgtaaattgtgtgctacacattctttacatccgtaaaattgaaataaactatgtacatacatatctgcgtacttttttgaagactaaagtgaaagcaagtttattaagaaagtaaaggaataaaagaatggctactccataggcagggcagccctgagggctgctggttgcccatttttatggttatttcttggttatatgctaaacaagggatgggttattcatgagttttccggaaatgggtagggggtgggcaattcccagagctgaggattcctcccctttctagaccatgttgccatggcatttgtaaactgtcatggcgctggttggagtgtagcagtgaggacgaccagagttcactttcatctctatcttgctttgggtgggttatggcttctttactgcaacctgttttatcagcaaggtctttatgtcctgcattttgtgctgacctcctatcttatcctgtaactaagaatgcctaacctgctgggaatgcaggccagcaggcctcagccttattttacccagcctctaaacaagatggagtcgctctggtttaaacgcctctgacatttccccgctcccttttataagagaacccttaatcctaagggtcatagagagatgaaggtccatcttttgtaacttctggaggctgaatgaggtgatgatattcctgcctatctattagggtctcagatccagggtagagaggagttcagtcagagaaagtccgtatggtgagggccattcataactctgactaaaagtgatataactagtttccagattttggagaaattagatagagagaaacaagcatgcttcaaattttgttcacaggagcgtaatttatgcaattgttgaaagctgtcaatagctcaaaagaaaggtttccttgactccaaagtcagccaatcagtgttggtctatttcctttgggtcaggggtctccttagtatcatccctttgtggttgccataaagatgttaccagaaaggggtcctaaaccagaccccaaagagggttcttggatctcacataagaaagaattcaaggcgagtccgtagagtaaagtgaaagcaagtttattaacaaagtaaaggaataaaagcatggctactgcataggcagagcagcccacctcccttttttgttggagagctgctggttaaacttttgttagcacaccactggccagaggcaataagctactagccccaggccagatggctaccattaacatagtttgtttgacccacatgatattatttaaaacaaacaaacaaaaaagctgaatggcaagccgacatttacaaattgtgagaattcacataacaacctggaattcctcattctctgaaggatcagatctggccccatcagattttcccatggcaacactcagttggagctgagccactgtagagcttcaggtggggcatgcacccttacttaaccaccatcccaccactccctgttgtcccccaaaccctgcagctaagtgccaaatgccattaatccccatgcctgcactgtggattttctctgcccattcttcatcccacagcagcacaaactgaaccatatttttagtccagaaatctgaaacctcaggcttgatttataactaaattagctttccttttctgttggtttaagtcccattaactcacaagtatttctcaaaagacttacttaaaacatatgtgaaagggctttgaaactattaaaagctaccaaatggaagatatttataggaggcatatactttctatcatcatttaattttatactttattaataaaaattattaaaattcaatttgttatattttcagtaactaatgacaatgaatatattactaatcttttcacttgtcttttcttgctttcctttttcctcctttttccccttttccttattttttctttcactttaacattatctgcagtacaatgtcagtaatgaggtcacatttttctattaaaattcatactttggtctttgttttggcctaatttaaacactgacatgggctcatgctaattagcctgaatggctaaatcccccaccaattaagcaaatgtagaaattgcagattatttcagttactctatgttaaggttaagtgaaaaaaaaaaaaaagtgatgtatgtgatctaaagtcatcaaccccaggatatcctgttaagtcatggactatttcttatcattatggtatcatgaatgcaataatgtttcaaattcattccactccaggtttagacatttgtatcacaattgcagtggattcttttttcttttctttttttttttttgagatggagttttgctcttgttgcccaggctggagtgcagtggcgcaatcttggctcactgcaacctccgcctcccaggttcaagtgactctcctgcctcagcctcctgagtagctgggattacaggcatgcaccaccacgcctggcttattttgtatttttagtagagacagggtttctccatgttggtcaggctggtctcgaactcccgacctcaggtgatccgcctgcctcggcctcccaagccatggattctttacagtccactttaatggcaagttgcgtctctatgagggaaaattttctttgtacaataatgaatccatttaattttttcaaaagtatgttgctttggttccttttatcagcacacataaaatcattttgtgttaaccgtgtcatataaaatgccttcactttgcaatcttaaccttccaaatggattgagccttagatgtttttttgttaattatctgttaataatttgagcacttttaacaatagaaataatgttgtaagtggtgagtaaattcccaggctagcccctaatgtagttaaacatagcttgaatggtattcatctaagttctgatttttggagcaagaggaaaaggagtaggagaaagaagatgaaaatgagaagagaaattggtgaaatggtatagcaggggcaaagacagaccatgcaaagaaagaaaaggaaaagaatgtgaaaggctagaagtgaagaactttccttgcagttaggctgtgctctaagcaaaattttgagatagatgcaaatgtgttttgtgtcctccaattttcactgctgcatccctctctctggaacactggtccccccatttgatcctaaggtcttaccctatccatgcctgtggtacctccaccccaacaaacacagtctccaacctcttatttcttggtgcatctattcttagcaaggtatttagaaaagatcagtttaagagaacctaatcattttattattattattttttttttttttgagatggagtttcgctcttgttgcccaggctggagtgcaatggtgtgatctctgactctgtcacccaggctggagtgtagagtgcagtggcacgattttggctcactgcaacctccgcctcccaggttcaagcgattctcctgctcagcctccgagtagctgggattacaggcatgtgccaccatgcccggctaattttgtatttttagtagagatggggtttctccatgttggtcaggctggtcttgaactcccgacctcaggtgatccgcccgcctcggcctcccaaagtgctgggattacaggtgtgagccactgtgcccgaccattttataaaactcatagtccccaaacctctgaaattgattattctctacttaggggaattccaagcaatttcacaaaatgaaacagaaaaaaattaaggcagtattttgaaagaagatatgtttcttgggggtcaccttctaggaggagctccactaagcagtctctagggtgtattgctttctccatttctgacgggacatttccctgcaggcttctagttgcagagaccaagcctagctggctcccaagacatgtccctggacggaatcaagttggttttttggtttctttttcttttgtttttcaaaagtgttctcgcagttgggcacagagcagaacagagagctggttattggtatgtgtggctgtgttgcaaatggagcctgcggagagaggcacagttgtgggtagggatacctatctcacggccttatttccagattccttctgcaaattattcatcatttgccaaagttccaggcagctggacacagttattatgctagtaaataaatgtgacaacatagcttttgttgcttggcattgggaaggttctaaagtaagaaaagtcaggaaagttgttggcaatgctggtaacgttttcaatactatatgattttaaggctgagtccctgttgaaaagagccatatctaagaatgagatatacatacatggctgccagcctttgtgtaaccacatgggcttctctctggagtcactgtccccaccgctatggatgagtaagctctgctctgggaagggatgcttggcctccatgttgatgcgcagcctcttcagaccacaaatagccaggtattcagtggggagagtgttggtgctgcacagggaaagcttcaggtcttggaccagcgtgaagttcagcaggtggcccagcgcagatgtgtccgtgaaccagatggtcagatggccattgtagctggttcgctctactgcaaggggcaggacggttttacagttgcacatcaggttggccaaactgtagtcacaatcccggatgtccgcagaacagctgcagttccgaatggtgttttcccttgtgaagatgagcgtgctgttcttctgacctttggtgaagcagttaagtgcaaagacacccagagtgctgatcagaagaagacagtgcctggaaggtggtgccatgcttgcccagcatgggccagcgtgtttatcccccctctttttgaaccaatttgttggaactcacctgaaagaaaagaggcagctttatcacaacctttcatttgaaatacacagcttatggaaaaggaaccccagaaaaaaacaagttgtaaacatttctttcttgcagttctagtaactgtttcctgagccacaggcaatgcttgcagcccaggcactgggcaagctcttttctcagcacctcatccagagacagcagccaaacctttgagctctgctcatctgaggtgtaaaactcccagtgatgttggctgacagtgagaccaacatgccaacaacacagccagagcgatgccagagcggatgccagagaggagacctaccgcatcctatctatgggcagggatttggagttgaaagagcacattctccaaacatccaattactagcatgaagcgcccaaaaacccctgaacatgacatgctttcctccccctcaatatctgacttcctggaattcgggagacaaacacttctttgttggattcagctatccaagcgctacctattacacaacatagcatgaataccaatgaagcatttagttaatggcaagctttaatttctaagtagataaacatgcctcccatccccaccatattaatctgtttgtgagtccattcatcctgttcagggcctcttacaaatgtacctaggtaactgtggtaatagacaacaaaaagactaatcacccaccgattaatcacaattattttgacttagctactcttatgccagaagaaatttatgaactgatcttgtcaatgtattgcagggctccaaaacaaaaccatatataagaacttctaaaaaatctaaataaggtagggatgcatgggtaatttaaagagcagcaccaatgtccagttttgggtaaaagccctacagtgtctggcatatgacagatgcaggatcctcctttgtggtgtgattggaatgagatgagatgagcattatggcagagtgtaccacatttcagtttggcgaaagtaataacattcccccaatgactgaggagagaaaccaaacaatacaattcagtcttctccatttgctaagctccatgggtgtggtgggatacttggcatgcgacctctgagtgggagggcccagagctactggcagggccactacactaagggccagggagccacagatggaagggtcagtctgaagagctcaacatgtgtccaaagagtacagtgacagcaggaaagaggctaggcagacaagcagcaattagggtgtaagatgaggccacaaggcaattagaaatccaaaggaatcaaggctaaaaatgccagggatcgggtagacaggcaggaggcacaagccacaaccccatggctgggatgccaggaggatagaagtaagctctgccgcgtaaacttgaacagagggtgagacattgattcacagcaactgtgactgtattcatgcattcatccctcccttccttccttccttcatttcttcatttcttccttccttctttccttccttccctccttccctccttccctctttccttccctccttccctccttccttccctccttccttccttccttccttccttccttcaactaatgcttattggaagattactaggtggcatgccctctgctagccatgggggtacaactcagaacaagacaacccagggcccagtcctcatagaacttatgtcctaacgaaattgattctgcttccaatgggctggggcgtcatagcccaaagccaggcccgtcctgcatgtgaggatggagaggctatagcagtggggaggaggcgagaggagggggcaaatgcaggagttaggcagggcccagcctgggctgtgtgccaggccctggcttaggccaagcagaagaaacaaagatacaaaagacctggatcctatcctccaggatttatcctcaaaggaaaaagaccaataaggctgaactgagaagcactgtactgaacatacaggcggctatgagaacatagcagagagagagagagattcgacgcgggggactggataaggcggtttagagtgctttgtatctattttgaagttggcacaggattttcttaaaggcttcttattaaatgtattaataggtacattttgtcatgaaagaaagagctttgagaaacgtggagaacaagcgttctccctgaacaagaggcttaacagtcttaagcagtgttagaatgtgggtgtgtctacccccttagtgaggaacggtgtataatttattaattacaagataattttagacaatcagctgtcccagattccactggaggcctctgggacttcgtgtcccagtaaccctgttatcccagaaccaggaatgctgtcaatactgttggcccaccctgaccctagccttaaaagaaaaaagaggggagaggtctattcatcagcccgaacctagtgagaaaagtgtctgcctccctgtttcaggtgctgatccttttagaggcagccgtggaagaggaaaagagatcagaagagaaaaggatattggtttgcggaacatgtgggacaagaagttcccagaagaatttgtgagcaacttcccgacagtaaggccctggctagacctcaggatggtccctgcctcctggacattaggaagcccaaaggccagaacaaaaacacatgcctagtgggggaaggctcactaagagggcaccaagtggggcaaatacccctggtaacccatttatggaggctgccacagaaatgctagttggaaattttcctccttcagtctatcatgaatttcttttttctcttttgagatgaagtcgcccgggctgcagttcagtggtgcaatctcagctcactgcaagctctgcctcccaggttccaacgattgtcttgtctcagcctcctgagtagctgagattataagcacgcaccatcatacccgactaatttttgtatttatagtagaaatggggttttgccatgttggccaggctggtcttgaactcctgaccttagggtgatccacccatcttggcctccaaaagtgctgggattacaggcatgagccactgcactcggctgtaccgtgattattagttcaaggttctctttcactggggtaaagaccttaagagagcagtttttgggctttatattctcaatttcccgcacagtgcctagcacatagcaaggactcaacaaatttcattgaatgaatgaaaaaacatagtttaccaaatgtcagtgtactcaaactcttttaactgctagctatagaaatccaattaagactcacttgggtaaaaaaaaataaaaaaataaacaaaataaactgctcacttatttgaaaaattaaggaaggatttcaggcatggcttgatccagctactcaaaaaaggttgtcagaaatgtctgtccgttcttcatttattctttctcatttgtgggctttgttcccagataagatcactccttctggggacaagatggtcactagtagatccaggtttactttctatcagctgagcaacctctcaagaaaaaataaataaataaataaacctctctttaaatagcaccaggctgctgggtgtggtggctcatacctgtaaccccagcactttgggaggctgaggtaggaggattgtgggaagccaggagttcaagaccagcccagccaacattgtgagacataatctctacaaataaaataaattagttggacatgatggtgtgcacctatagtcccagctactcgggaggctgaagcagaaggatcacttgagtctgagaattcggtgttgtttaagccaccctgttgtggtatctgctatggctgcacaggcagaaatagggacacaagtgcaggttcagggcaaggtgtgtgagcacactcagtccctggcctcggagtctctctggatggcttcttgcctagggtgactgacagagggagggatgatatgcaaaggcacctgttctcctcatgacctaaccccaattcttactccacgggttcatgacagcctattctgctggagactgtgtcttaaaacttcctcccctagtttctctcaagtacccctcgtgagctgtgatttcactgggctttgaactcttaggccatttgaggctgcagtgagctatgattgtatcactgcactccagcctagatgacagaacgagaccccatctctaatgaataaataaatatggctgggcacaatggctcaggcctgtaatcccagcatttggaagaccaagacaggcagatcgcttcagctcaggagttcgagatcattctggccaacaaggcgaaaccctgtctctaccaaaaatacaaaaattagccaggcagggtggcatgtgcctttaatcccagctacagggaggctgaggcaggagaatcacttgaacctgggaggcagaggtttcagtgagctgaaattgtgccactgcactccagcctgagtgacagagtgagactttgcaaccaaaaaataaaataataataataatgaaataaataaccaaataagtaaataaataaatattaggaggcaaaaatacattggactcctgagtcgtacactcagcttgggagccaatgaatgggatcagccccactgcaaagagtggactgagagggtagaaggatggttctgcaaagggaaatcaggaggcgctatcagaaaagggccaggtaggcagtcagaaaggtgggtgcccacaagacccatgggatgagcatgggtgagcattgcaactctactcctctcagtctcagcaaacactaaagcaccactttgataaaatgccctctaagagtgcagatatatgtctgactttgtgggatatattcagattttcaaattggctcctttactggagggcccctcgattttaccacccaagaatcttcaaggatttttgcagggacacactttgggtactgcatttgtgagcaatagccctgcttacctctccaagtcctggcttcacagtgtgttccttggggtgcccgggccctagctttcttctggctttaaccccagagccataactcagatctatacttgagactgcttcttgccagggcatcttctcagcttctgactcttgagcctttcacaattttcttctcttgagtctttcccctaattgcatttccactttaaaaataaaaatcacagccaggcatggtggttcacacctgtaatcccagcagtttggtaggctgaggggggcagatcatttgaggtcaggagttcaagaccggcctggccaacatggggaaaccctgtctctactaaaaatacaaaaattagccaggtgtggtggtgcacacctataatgccagctactcaggaggctgaggcacgagaattccttgaacccgggaggcagaggttgccgtgagccgagatcgcaccactgcactccagcctgggtgacagagtgagtgagactctatctcaaataataaaataaaaaccacttttgatttcaaattaagctcacttccaaattacgtttttaaattgcttttgatttttaattgctataaggatttggagaatgtcacttgatttttccacaattagttatttgtcttttgtgttaggactatagagctcagaacatcattatttatgacatttcaaatctgttttgggcaaatgctccaaatgctgtcctcccactgacacaatatctccttactagtaatatcttcttataaacagaactagtcaagtttgaaacattccttttgaagccaagtataaacattatctaaatgttgggtgtaatcctagattgagaaggaatctgtgtggaatttgttttgaagtaactgatgtctgtatctcctcaatttagaaccctctgtctttatgcagctagttgctagtattgttcttgagatttcttcagctgcaatacaaaaataatactcaaactgattctgaatagtagctctggtttttaaacatgtccagtgatttaaaggctcaaatatttaataatcatgcacaaaggctcaaatatttaataagtaagcacataggccgggtgtggtggctcacgcctgtaatcccagcactctgggaggccaaggcaggtagatcacgaggtcaggagttcgagaccagcctgaccaatgcggtgaaaccctgtctctactaaaaatacaaaaattagctggccatggtggcatgtgcctgtaatcccagctactcaggaggctgaggcaggagaatcgcttgaacccaggaggcagaggttgcagtgagctgagatcgcgccattgcactccagagtgagactctgtctcaaaaaaacaaaaaaaaaaccaaaaaaaaaaaaaacatgcacagtttttagcatcttgactgaaaaatttggatgtgtagacatcccctgagtatttgtcatggttgcatcaagctacttattgcgtcttacaacctaggtatatcagagacttctagtccctgtgaatgccatgttctcctctccttctttagcacactgttggacttcatttctgagcttctggtagtgaagtggtaccatgtgattgagttctggccaatggaatatggtggaagattccacgaaggaaccgacggccctagaagatggcagaactgtagacaaaaggctgaatccctgaatgattgtatgaaagagagcacacccctcttcccccttaatggcattagtctgtgatgtaagggaggaacagatctcaattactctaagccactgatatcttgaagtttgtcaaagcagctagcctaccctgctagctgggtacaatacagcaggtgctaatattgctttgcaacttaggatttttacatcctcttttctcaaaagaaaatgagaaatcaacatttagaggacatttattggatgccaggcaaatggcctaagtcatggggaagcaaaaatgaagaagatatcatccatgccctcaagggacttgaagtgtgcccagagaacttggaatgtactctgggaacaaacaactgggcaactaattataagacaatgtgattggtagttcttaaagatgcagatggaggccaggcacagtggctgacgcctgtaattccagcactttgggaagccaaggtgggcagatcatctgaggtcaggagtttgagaccagcctagccaacatggtgaaaccctgtctctactgaaaatacaaaaaaattagctgggcgtggtggtgggcacctgtaatcccagctactcaggaagctgaggcagcagaatcacttgaacctgggaggcggaggttgcagtgagccgagattgcgccattgcactccagcctgggcaataagagtgaaactcatctcaaaagagaaaaaaaaaagatgcagatggagtggtggtaagggagaaacggaaagactctcaaaggatgtgctctttgggccaggcagagaagaggttcgggttaggaagggcgaggcagtgcagatataagagtcattggcgcagatgtcagaatgactaaagtccttagtatgtttagagcaggtataagacatctggaggtccatgaggctggggatgtaggcaggaagacagggttagacaggaccttgctggtcaagctaaggggtttggactttatgctggcagttacttggtctccaaactcttctgatcatcaccccatcaataaatgattttaaaaccctccccaatagatgtatctgttaatttataaaggccattcacatattaccatgcttacatatcatctgtattatcaacaatacacaaactgtagcatttttaaaaatttaagatgaaaaataaataaaaatgaaagtttgaatattttcagctctaccccactagcttggcttgcaaacctcctgtgaggtaagctccctctttggaggctcctgcaagagacaaaaaatgagatggtaaaggtctgaagcaggagacatctacttaaatcttgtttaaggaaggtaacctaggttgccagggagagactgaatctggggagaaaacactagtcaggacagtgaattctaaatagttttcttttgtattttcctcagtgatttccatctctccatttgttgactccttctaactccaggctctttggataaatttgtttcaatatctggaatcctcaaggggatggagagaaccaagaatgtaggattgagaaggtggggatgaggatgaggctgtcttcctcctatgagcatgagtcaggatacctgctagaacctccaggagggaaccagtggtacagggagcaggagagcccagtgggcagcacagcaaagcatttgtctctctctgtctcccaggctggagtgcagtggcgcgatctcggctcactgcaacctcccactcctaggttcaagcaattcttctgcctcagcctctcatcgttgtctcattcttagcatcccaacacagcttgcctgggaacgccactccctgagacatccactgtgagccctgacagccacgagaaaaacatagctcattttctcagagttaggagcctctgggtggcttcatcagactggcagcaagcctagctgctagtgagggctagttatggcaaactatggagtaggtggagtagctctccgatccccagttccccttgatgtgccttcctcttaactccctgatcatccattcttttctttccaggagccagtgctgaaaacccgctcacagattggtatctgataccagttggttaggccttaatcggaatttaaactgacacattcttgtccaagggtatttgcactgtaagccttatggctaccttgttccttattagagagatagcaaggatcaaacagaaagtatgggaggagtgtggggtggagacccacgctgggctccagaaacaagtggtcacctgttctcaggtccagtgcccacttgtccagggctgtgcaacccctcttcccgttgaggtcaaggaggggtgttggctattctgttatgtggatgagatgcccacacaggcagtgtgagggctttagctgtaggaccttgaaatgctcttgaaaaaagggatttttagcatttttcttttctttggctttgttccacgaatgcactgcaggagataggttagagataaacactatgtaagatatttgaaaacggaatgatatctttgttgtttactatttcaaagcttatgaagttgaaaactaatttgggtccctccccaatgttttcttactgtgatactgtgatactgtgatactgtgtcttttatttcttcttcacattccacaacagcacatcctcatccttggtatgagccactgaattttcacaggcccttgcaaggatctaatgctgaagtcaccgttctgtgcagtctctgtgggtgaagatcacttccctttcattgtggtttacacagttcattgtgcggggcaggaaatgagttcccagtaattctgatgtgatcggaatctcatttggtttctatagtaggatctaaactatatgctctcatctgatatttttgctcatctagaaaaagatgaagtaaattcatgtctccataagttggaattatgcaggcaaaattagcttcaagtatgcaatttgggttttgagaggacacactttaaaatatttttgtgactgttcatgttgaactcactagtatatagttggatcagtcggagaacctgtctgagtcttatttctcttgacagggcacaggataataatccaaccacacaggttgcaaaagcaaagtagatgcatgtgattatatatatatatatatatatgaatagtactatattatttatttattttgtttagagatggggtctcactatgtcatccaggctggtcttaaactcccaggctcaagtgattctcctgccttggcctcccaaggtgctaggattataggcatgagccaccacacccagcctgaatagttctgtagtattatgtatattgtatactcataagtactcataggcatgctacaatatacatagtactattcatagacattgatattttgtaatatcagagtcatagtgataacaaatgtattaccatgctctgtgagggcatcccaaaagccaccccaaagaaatctaaagtaactggttcatttaatgcattacttgtatcaaacatttgactagacagagaacaagcacagcgtaaaacaaaaatgtctctctgcatgatttttcctgtaattaatccaatcagatttacaaacgtcctcctgtaaattctgaggattgtgaggtcctgaaattattagtgagctagtctggaaaatagaaattaattatctgattcccatttctactaacttaaatgtgaatgaaatgtttaaaggaacagcaggaatatgggatgtgatcaaaacactttatttctgatctccaactgtgcctaatggatgttatagtaggtcaaataatggtccctaaaggtgcctgtgtcctaatacctgggccctgtgaatacattaccttacatggccataaggcctctacagatgctattaaattaagaaacttgagataaggagatgatcctagattatctgggtgggcccaatgtaatcaacagggtccttataagaagaaggcaatatgacaactgaagcagagattggagcaatgtggctacaagctgagaaatgcgagcagcctctaggagctgaaagaggcaaggaacagattttcccttggagtctccagaaggaaccaggcctactgacaccctcacagtagcctggtcagactggttttgaacttctgacctccagaagtgtaaaataatatagatatgttgtttcaagccactaacattgtagattatattttttttttttgagatggagtctcgctctgtcacccaggctggagtgtggagtgcagtggcacgatcttggctcactgcaatctttgcatcccgtgttcaagcaattctcctgcctcagcctcctgaatagctgggattacaggtgtgcaccaccataccaggctaaattttatatttttagtagagatggggtttcaccatgttggccaggctggtctcaaactcctgacctcaagtgatctgcctgcctcagcctccgaaagtgctgggattacaggtgtaagccactgcgcctggccaagttgtagaaattttttatagcagcaataggaaatgaatacagagacggtgaggaaaccaaaccaccacatcaaaccacccttgtggaccaaaccagcccttctgtattcacagccctgcagtgtttgctaattacattatgtggtttattcctctcattagcctggatcattggtaactagtctcctgaaataccgagctcaatgctcccatagaatagtcacactatgttggacccagccaagcccaaatggatacatctggctacgtcttatgagttgagggggaaccatcttcaggtggttaattgcatacatggaattgttgaaggagagcgaagacgatatgggagggcccagggcagggaagagcagagggatgggacagtggcatttgtgtctttccagcccaaacgtatgcctgaggctgagtccggtcaggtagcaagcagaggctgcaagaagtgcttttaagaattctgagatgtgaggcacaagtggccccctgcccaggcaagaaagggtgacattgagtggtggacagaagcattttctccacttctgtactgagtacagctcagctctagcacagtgaggaatgagggacagatggcactatttgaccctttctcaagaacagactggggctacccctggattttgctctctggtcatcaagcaacagggagccccatggccaaggtaagggacagtcagcatccagtgggggctggggacagaagcagatgaaaggaccattgtgcgcataggcaagacccctggggactcaaagaagcacctagaggaaattctgttttgtagacgtagtggtgggaggaggcaaggacctgtatctggtaggtgggagcacgagccaacagaatacaagctattcgtgttcacttaacttcatctgtgccctctggctggtgaagccaggagctcttcaggtatcagctggattacctgtttgagattaaattgattgaatcatagaaatagactaaagtgcttaggagcttagaagctgagtaagaactgactgaaaagtagatattttatttggaaagcactgagctcacctgggtattaatttcacccactaatttgctgcctggatgcggggcttccttgttggtttactgtggggttttattagtccattttcatgctgctgataaagacatacccaagcctgggtaatttacaaaagaaagaggtttaatgaactcagtcccacatggctgggaggcctcacaatcatggtggaaagtgagtcgtgtctcacatggtggcagacaagagaagagtgagagccaagtgaaaggggtttccccttacaaagccatcagatctcgcaagacttattcactaccacaagaacgttattgggaaaaccacccccgtgattcaataatctcccactgggtccctcccacaacatgagggaatgatgagagttacaattcaaggtgagatttgagtggggacacagccaaaccatatcagggggtcaggtttctgatgccttcttgctgattgcggtttccccagtccttagcacagggcctggcacataggagcactccatgactatttatattatccaaatgagtccctacatttgctaagccaatgaggcatgttattgatccttgattccctcttatgcctttttttttttttttgagacagagttttgctcttattgcccaggctggagtgcaatggcttgatcttggctcaccacaacctccgcctcccgggttcaagtgattctcctgcctcagcctcccgagtagctgggattacaggcatgtgccaccacacccggctaatttttagtagagacggggttcctccgtgttggtcaggctggtctcgaactcccgacctcaggtgatccacctgcctcagcctcccaaagtgctgggattacaggcgtgagccaccacacccagcccctcttttgccttttacctcctaggattgtcgagtgttagcaaatccgcaggcaaaattcatattcttcttcagcgactttcattgtatggcctagacatggcagaaaaaccagaatgagtttctgtgtatgggtgacagggtgggaatttgagcttactctcctatggcctagctgtgcatcatccttgaaagccattgaatgacatctggcaaaatcccaggaggcacctccaacctcctgtgactttacaaaaggcctagtctaggttcctgattgccttacaactttcctgtgaatctgatgaggaggaagcgtgaaatacacttggctagaatggagaccgtgagtcccaagtcaggcctccagtcactgcccttccatcttatgccacacaccttccgaggggcgaaggaaaacatgagtagaattagtatattttggtctcacagatatttgtgagcatcacgaagccattcccctaattgctcttggttgagagattacaacagcccttgctgcaaaactcccccacaacctaacctttcagagtccaatcttgcaaagctaactcagggagagctttgcttaaattactgggctagtattatgtgagtgtgaagttgccaaggaaaatgagtcagacactaatccctttgctaggagatgagagaaaaaaaaaaaaaggctggcagacctttactattttaattacctgcttccagaacaataaaagagaattcagatcttccacttaacagtcgtgcccttcttatattcccgtaaagtacctgcactatttccttaagatgtaagccttgggcttttttcctttcaactgtgttcaagctatagttccgaccattcgattttggacaaaaataagaattaaaatttcctttgctggttttagttacaaatattggaaccaatgaacatttaaaccttgtttctttcttgaaagatttttcagagttttaaaatgcttcctgggaatgatgactaaaggtaatgtgggatcctggatgagatcctgggacaaaaaaaaggacaatgggtgaaatctaaggacatctgaataatgtttggactttattttataataataatgtgtcaatactggttcattaattgtgacaaatataccatactcatgtaagatgttaactctatataagaactctctattatcttcacgatttttctgtaaacctgaaactattgcaaaataagaattttatttaaaaagagtgaatcctgatctcattgatgactctttgacgattagttttgtgacagcagcagagctccagtagataatctggcatcacaatttgggctaaaccgagtgcccatgaaatagtgtctaggcacaactccaaatgaattcttcagacctcctggccacagagaagattctttttttgttttttttaatgacccagagaccaggcatttcagagatggaaatgcgaagtaatccttttatgggaagtggatcaaaactgggaaaggagaggcatcacggcatgttgtggggacaagcctcgaggggtgcgtgtgtgtgtgtgtgtgtgtgtgtgtgtgtgtgtgtgtgtgatgtctcactgggcttttgttgttctttcttcttttctttcttccctccctccttcctttctttctttctttctttctttctttctttctttctttctttctttctttctttctttctttcctctttctttctttttcctctcttcctttctctctctctttctttctttccttttttgagacaaggtcttgctctgtcacccaggctggagtgcagtggctcactgtcaccttgaacttctgggctcaggcaagcctcccaacctcagcctcctgagtagctaggactataggtgcgtaccactggctaatgtttaaaattttttgtagagacacagactcactgtagtgctcaggctgatctacaacttctggcctcaagagatcttcccaccgcccaaagtgtggggattacaggcatgagccaccgcgcctgcccccattgtgttttcttattctccaatctggaccccattcgcctcatgctgggtatgttgccctctgtgtttggggatgatttctgtttcttgtccactaagaaactaccttcatctctgatactgtcttcaaatctctcctctttcatgacattttattatgctgggggaataggtgacagttcttgtttgactcaaacctacttttcttagagtgcaacatcagtctattgtaagataaattaaaaaaaaaaaagagcttttgtaagccaatctgttatcacacagagcctagtacctagtcgtgttagatttttaagccactccaaaaaaccagacttttgctgtaatcattctattgcaaccattctcatcaggttcccagtgaatcccaccacccccataccaaatccagtgattaatttcctggtctcattttgtttgacttcccacaagcatctgacttagttgcctcccccttctttttgagtgaatagttttctgttcctccatgatgtcacattctcctggttttctggctccttcaatggccactccttctcagtcttttggctggcatttgatctttttttttttttttttttttttttttgagacggagtctcgctctgtcgcccaggctggagtgcagtggtgtgatctcggctcattgcaacctccgcctcccgggttcacgccattctcctgcctcagcctccagagtagctgggactacaggcgcccaccaccatgcccggtaatttttttttttttttttttttagtgcagacggggtttcactgtgttagctaggatggtctgactctcctgacctcgtgatccgcccgcctcggcctcccaaactgctgggattacaggcgtgaaccaccatgcccggccctgatcttcttacctgttattgttgcatgtccccagctcagtgcatggctgtcttctgtatgtgcgtccactctcttggtgcctgcatgctgtcctgtgaagttaaataccacctagatgctgatggtgaactgagatacgtctctagctcctgactgcatcatgctcacatgtcccacattgtatctgatagctctttctgaatgtctagtagacatctccaacttaacatgccaaatacacagctcctgattcccaagaaagttcagactcctatgagaaatgttactgtaccagtaattcactgttcctcagccctgtgttcccaaggctaagctagctaaatacagcaaattgtcattgataaagaggcaacatactataatatataaaatgtgatacatgtatgttgtatactgaaaattgaatgaaatcaggaactatccatatttttattcactaatagtaagatctaatgagtgtttcttttgtgccaggtactgttaagtgtttcacgtgttttatgttatttaatcctttctgtaatcctacaggtagatattatggccccccctccccttttttttttagaccgagtctcagtctgtcacccaggctggagtgcagtggcactatctcggctcactgcaacctctgcatcccggattcaagtaattctcctgcctcaacctcccgagtagttggcattataggtgttgcaccaccacgcccagctaatttttgtatttttagtacagactgggtttcgccattttggccaggctggtctcgaactcctgacctcaagtgatccacccaccacagcctctcaaagtgctggggttacaagcatgagccactgcatatggtcccattttcatatcaggaaatgatacatgggtactcagggaggttaaataacttgtccaaggtcacagaactagttaataatggctaaaatttgaacccagacagccaactatactctgaagagtcatggtggaaattacagcgctatttcctaccccagggtcttgggcctattcaagtgagattccatgcattgtattctattactagatgctgtagcctttaacctatatgtgtatagaaccctcatgctaaatgctatgatttgaatgtgtttcctaaagttcacgtgttggaaacttaatccccagtgcaacagtgttgagaagtgggagctttaaggggtgacctttaagagggcggtgccctcatgaatggattaatgctgttattgaggagtgggttggtcaccatgggaataggtttcaaataaaaggatgaatttgaccccctttctctctgtctctcttatgtgtgtgcacatgttctcttgccctttcaccttccaccatggaatgaaacagcaagaatgcccttgccagatgcaggccccttgaccttggaattcccagtctccagaaccataagaaagaaatttctgttcttaagttcataatcagaatagaggacaatatgagcagagtgctgcttctgctaacataggtatggaatgtgggacaaagaattctcagagagtgagccactgggaagtcctaactaaaatatgtggctaccgtacttttctacttgacacagtccttgagagagtgaattaggcaatgagtgcaaatccttcaggctttccccttgagtgacttggtagacactcagttaattgcatcactggggttcacatccacagctttgcacagctgccccttggtcccacgcccacagaactgtgaggcctgcctgttcttcccactggggcctattgacctattagctcccacagacacagacacaagccactgggcactgaattttaaaagctgataatgtggcagctttaagcagtgaaaaatattagtgtggaaaagaaagatgagaaatccaagtcagctcttgaaaagcactcatttccataaatactttattgaaactgttattttcagaaaatgcccaatttctgtcagaaaaaaaagtaatgaaaagtctttttttttccttccaaacatattgcattatttagactaaaaaaaagcaaaaaacttctcaaggatggctcttttcggtaaaaaattttcaaacaaatgaagtcttttttttggtattttttaagggtgggttttttataaatattatgcacaatgtttttgaaacatttcctgtcctcagtatacaccaacatactttttgctaaaagctttccaaaaatatgcttattaaacaaagaaataaatgcaagactgtatatgttctactcattttgaattaaaacattcccctcttcatcttgccttttgctacattatttatcatgctttttcacttttgaataaaagaccaattttttaaaaacacgaactatccaatccaaatgttaatgctcatcttagcttactttcttttctttgttttctaatcagcaaactctataaagcctggtgtgtaaataggcagtaaatataatattattaaaagataaaacagagcaaagaaacagtatcagccggtgttttgggagttctcacttttctttgtttgtgatcacaataaggaaaagagatatcatatctcttttccttaattgttatttagcattgaagactaatggaaaagtctagccagatgttttaaaatagagacaagatttcaaggagctatctgttatattagctttaagtgagtttatctttttagggtttaaatgagaagaccatgtcattctttgcttaatgcactgaaaatctttcattttaaaggcagaatctcagtaaagaggaattcatatgcctggaagcctaaaaaagtgtttcatagtgaaagccactcatacatgtacattatgttcaggaaatgcaaatgcaacaagaaggtgaccctgacaatggttcttccaaccgtcacagttcctgccatgcagcagaaattctgaagctctgaaaaactgtcagactagacatgctttttaaaaaagaagaacacagaaattacttacatctgagagttccaccgtgaggcctcgcctctccactccacagacctctgcctggccacggatccttcaccctggcttgacagctggtttaatctgcaagccagggtggaatgcgtggtcttgcacttgctgttcttttccgtcttcggagggccagcagcctggtcatttccatggcaaccaggaggaagctgctggcctaccagtctcattaactacacgcaggagagaacctgccttggtgactgctgaccactcttttggggttctaaactgggaagtttctagaagaaactgaggagactgttgctgtaggctgatcccaaaggattgacacaaatggaagaaattctactttagcaggaaattgaatggattaaatgtagagtacggagactccttgatacttttactttcatgatttattccaccttttttggtctgatgaattgttacttatggtaaatgcctgcactactgtataaagtgtcctatcgtagttgttccaaagaaaaaaaactcatttgaactccaaagatagacattattctctgtcttttttaaaattcatttaaaaaaatattagaagccacaaaaccaataaataggtaacaattattctatgtacattaactgatagtccatgtgggcttctataacaaaataccattagttgggtaacttacaaacaacatatttatttctgtaggctgggaaggccaagatcaaggcagatttgttttctggtgagggtctgcttcctggttcatagatggcaccttctagctgagtccttacatggtggaagggaaactgtggtttcttcagcttcttacaagggcactaatcccattcataagggctccaccctcatgacctaatcacattccaacatctccacctcctatgctatcacattaaggattaggtttcaatatatgtattttaagggaagataaatacctgggccttaacaactgatgaagtctcactaaatatgggaaaaaaagataaggcaggggtccccgatctccaggccacggactggtaccagtccatgctacagtaggagttgagcagtgggtgagcaagagaagaagcttcatctgtatttacagccgctccctatcaatcacattaccacctgagctctgccttctgtcagatcagcagtggcattagattctcataggattgaattgagaatgctattctattgtgaactattgtgaactgtgtatgcgagggatctaggttgcatgctccatatgagaatctaatgcctgatgatctgtcactgtctcccatcacccctagatgggacagtctagttgcaagaaaacaagctcagggctctcactgattctacattatggtgagtggtataagtatttcattatatattataatgcaataataatacaaagtgcacaataaatgtaatcgcttgaatcatccccaaaccacctcctacccctgcctgtctgtggaaaaattatcttccatgaaactggtctctagtgccaagaaggggactgctgagataaagaaaaatcttgctaattaaaagcactaggagtctggagcaattgatttgtaattacccagatacagattctccaatatgttaaagaagagagcacctcagtagggaaatttattcattcatttatttattattcatctactgaatccttaccacacacatgcactgtgccaggagatttaaggggcacagagatcaatgtcatggttcttgtctttaaggaagttatactataggaggggcaattatgtaagttgcatctgggaaatgtttgaagggagatacagacacaatgcaggggaatcccagtgaaggtcggcctttgccagggagactggtgaagtccttggggagaggtagttttggatctaggccttaagggatggctgagatctgcatggtcagatgtgggggaaaggacaacgatctctcatggagtgattatttgatgaactgcggatccaagctgatggatatatccttcctcctttctgcacccagagagcctggcacaaatggcttctcggtggcccacaggataaaggaactcaagtaattaagaaaattgctggagcaaaggtttggaggtggaagagtcccaggcctattcagccatttggaaagccagtgaatcacagccagaataaagggaattgagaatagagagaggctgctattgttgggtgatcagtttcagcaaagcacatatatgaattctaccatgtaagaatagcaaagtggatcttggttcaaaccttgagtctgttaccttcttgcacattatttaaactttataagcctcagtttccttatctataaagtgggtataataatactttgttgaaaggtagagctgaggaaaaaatgagataatatatgtgcactggatgcctgaagatgagggagggaaaggctggccaacaatacaccgaataccccaactttccagagcaactgtggctaatccaatggtttggcgtactcaacctctatttcaacatctttctgtcttgcctgcctctactgtagagactggaaatctctattattcaacacaacagagtctcttgaagctgaggtttcagatgggatttaagttttattatttatacttgattcagaatgaagtcacgtggagagaggatcctgagactttgggaatgaattaagtgagaagagagaggagagtactgggaatctcttgctggccagggtctcagcagatatggcatggtctgttgtgggggtggccttctgactgagttgttgactggttgtggccaatatggcatggctcaagagctgaggactgtggcactaacttcctgttggagaatgtggcctcttaattcagcaacttcctggttgtggatgaggtagtagctccccatgatggttcaattctatggtgactttcagagttcagtctagaatccatttcttcagtccttccaatgactcaaggcagtatctgtatatctgaagaaattcctggtttaaaccagctagagtagactctgttgcctgtaaccaagaaccctgaattatatactagtgccttaattctgtccaatacaaggtgacagagtttggatatatgtccccgcccaaatatcatgtggaattgtaatccccaatgttggaggtggggcctggtgggagatgattggatcatgagggtggatttctcatgaatgcttgatgctgtcctcacgatagtgagttctcatgagatctggttgtttaaaagtgtgtggcacttccccacacctactcctgctttccccatgggacacacctgctccccattcaccttctccacgattgtaagtttcctgaggcctcttcagaagccaagcagatgctgctatgcttcctgtacagcccacacaaccatgagacaattaaacctcttttctttataaattacccggtctcaggtatttctttatagcaaggcgagaatggcctactatacaaggtaagtggaagtttgctggtactgtctcttctacttctttattttaatgactaagataaacagcataaggtatttagtgtaaactgagcacaaataaggcagccagtaatggtagctactatattgattactctttgtgactttctctatttatgactcggatgccttccaggacctcttgcttagtggggttcctggctgaaggcaaagagtgtgaagagccaggtacttccctggaaacttgaaggccaaacatgcagctgctgatggaatgtggctggggccctgtgtatggcatgttaaacatttaccccaggttttatatctccctgtctttttaaagcatttacttccactggctctttgtgttaaccggtcacatagtttaagttgatttagcagcaatgagtattgggaaggttaataaaaccacacctcagactgcctgttttgttcagctgtggagccaacgggtggtggacaagtgtttgttcacaatgagatggaattctagctttgtccttgaccaattttgttttctttctccgttttattttttatcataaaagcaatgcagtttttctgatagcacattcagataatatccaatgtattaagcaaaagtgaaaatccacacccccctctacaactgatcttctggaaataatgtctggtgtaagtctgcagtgaagcaaatcttgcttgattgttcactaacgtgttccttaaaatcttttaccttgggcctggcatggtagctcacatctgtaatcccagcactttgggaggctgagatgggaggagcacttgaagataggagtttgagacgagcctgagcaacatagtgagaccctgtttctgcaaaaaataaaaaattagccaggtgtagaggtgcccacctatagtcccagctactcaggaggctgaggtgggaggatctcttgagcccaggagtttgaggctgcagtgagccaagatcgcgccattgcactccagcctgggcaacagagcacgaccctgtctctgaaaaagaaaaaaaaaatcttttaccacaaggcctcaaattccactgtttctgacaccctctcttcatggattctcatctggattctctaccaccccctacttaactgcctccaaatcactaccagtgtcttctataagtgtttcttccatctggggcaggagtcatctcagggtctctctttccttcccaacttcccttccccttccttctttggcaactttaacatctgtattctcagctcactgcaggccgtcagcactcatgtcctcacctcatggccttgctgggccccagagcttgtgcagggctctatgtgtgttccttctccctgctccatcctcacagtgtctctagatatcagcgcctctggctttacctcttccatccaccctcagctccctgccctgctgcatccacactgccctgacccctaccgaggtgacccctacctatgacctttgccctctgcaaagtccactctgggtcctctcatggtctgcttcctcagcatccactttagggtacaggcactcatggagaaaatgcagagaactaagaattcctaatgcttggtttcctgagaacccctgatgtgatcccggaagtcttccagcggttctggcccagtggctgcaataactcttctccacttgtgtcagatactcactgctgtcacagcatccctggcctcgtgagaaggccttgcatctgagaggagccaggaatcgtaccagggctttcttaccatcctgctcacacctatatactccttagaacatgaacatcttggatcagacacctcgtaagcactgcctcagctcctttcagccacacctgtctttgattccagccgccactgtagtgacagttctgccatgagcctgaccagctgcatgtagaactaacttgcaagcacctctcacctcccatccgaagccttctctgtcatctctgcagcctgggacagacactgcaaacactccttagtagtctcatgaatgcaacctgaagttccggggacttaatgcctccatggagtgatcctttgaccaatgggggattcctcctttctcaatccaggcagacagtcctgagatgcgtgccttgtggcttctcaggtggttcacagaatcaagcagtaacttaccttgcgctgcccctcaccgcttccctctccctcactcttgcttctagggatagcagttcccaatacagtgcttgcatatatgtatatatatgcttttctgatgttctactctctgggaaaatcaggctaagccacattctttcttctttccagattctaaaataaattcttctacctgtgagctaaaagcagcccttcccaactcctgcgtttcttctctagtgatggcctcatctcttccaataagtagaatcttgatcttgatagttttaagaaatgtatccttagagcttcgaaaatccctcttttcagagtacccctcatatggaattacctccataaaatgatgggaagaatacctgaagcatcgaagtgatatcttcagtcccttagatggtttttaaagaactaaagtagtcatcatacatcatcttagtggcgacattacccatgggcttatctgaatctacaaagcagcggagtccctctcacttcatgatagttacagcacatacgattagcagagaataacaaaggcatgatatgatacagatgttgggcagctagcgaggcatgctctccaaataagtgactcactcttgtgcggcagttcctcagcggatgtgattccagtgtgtgccttggcaaaatttagaaattacaacatggtttggcccatagaggttgatgacaaatggtaagaaccatagagattaaagcataaatatcaggaatatcctgtactttctatctcttaatccctgctgtctgttctttggacttcagatgtgcaaggcctcctcattctgaaatgcagaaagtgtcacttgactctgtagtgccacttaggtgtcatttcactgttgcacagatctactggaacttcactctccaagtcctctcacaacttgcttggccttactgtacttctcttatttgtggcacctgactattagccaacctttccttggtcttccactgtcatgcatgattctataactttttcctggtgcttataatattattttactggtcacatcctttctatctctctctctctctctctcccctttgggctcttctttctctctctctttttttttttttgaggtggagtctccttctgtcgctcagactggagtgcagtggcaccatctcagctcactgcaacctccactttccaggttcaagcgattctcctgcctcagcctcccgagtagctgggattccaggcaagcaccaccacacccagctaatttttgtatttttagtagagacgggtttttgccatgttggccaggctggtcttgaactcctgacctcaaagtgatccacccgcctcggcctcccaaagtgctgggattacaggtgtgagccatggcacctggcctatttttcttttcttgagcagcacctaaagtgttgtccttaaccctgctcttcttcatgagttctagtcacttgtttcagttatatgaaggtcacccccgcttggagaataaactcaacacagactattagaaataagagggctgtcttattgacacttacttgtaatctatcctcagtttgaatgcttccagagatgaaaggcttgcctcctcacacagcagcatttttttcatttttggagagctctattatgtaaaataatttcttatgtatggctaaatctgtctcctgggaattttgagacattggctgtttttccgcccttaagagtaacactgaaaaatcttccctcttctttctgataacacttagcaatgctcttttggctcctgtgaagcttttctgagtcccaaagtctctcagaccccaagccttagaaacattttgactcttccttctttaatccaagagccaacaaatcatcaaatactggaaattgtagtttgaaatttctcctgcagaaaaagcacatttcaatgtgtaataattaaaattatagaaataataacttattcttttttgagacagggtctcgctctgtcacccaggctggagtgcagtggtgcgatctccgctcagtgtagcctcgacctcctaggctcaagcaatcctcccatttcagccttccaagtagctggacccacaggcatgcaccaccatgctcagctaatttttatactttttttgtagaagcagagttttgctatgttacccatagtggtctcagactcctgagctcaagcaatcagcctgcctcagccttccaaagtgctgggatttcaggtgcgagccactgtgcccagccagcaataaataacaacttctctcaacttaatttagagagctaattcaatagtgattttaaaaatccaatggaaattgatacaaatatcgaaggagttgatacaagtattctgaagttcaatgagataataaagaaaatattcaaaatatgaagaataataaggggggattagtcatttgacttattaaaacaaaatgatactttggtaggttgatgtgggtggatcacttgagaccaggagttcaagaccaacctggccaacatggcaaaaccctgtctctactaaaaattcaaaaattggcttggtgtggtggcatgcacctggtaccgcagccatttgggaggctgaggcactagaatccttgaaccaggagttggaggtggcaatgagctgagatccaccactgaactgcagcctgggcaatagagcaaggctctgtcaaaaaaaacaaaaaacaaaaaacaaaacaaaaaaaacccaccaaaacacaaaaatcaaaatggcagtcactgaaatagtgcagtactgacatgaacagagacagactgtaaccacaggtggcggtgcacacctgtagtctcagctatttgggataatcactggagcccaagagctcgaggccagcctgaacaacacagtgagaccctgtgtctgaaaaatgttgttttgaattgatatataaaagaagaaaatatatattactgaggagattaaggattactcagcaataatttggaatcactggctatgaatttggaggaaaatgcaaatatagattgtcactatatatggaatgaagtctatatgggattaataaattcttaaaaataaaatcataggaaaatgaggtaaaaattaattgaatagtaaataaacttttaagataagaagtacaggttaagtttcccttatccaaaatatttgggaccagaagtgttttggatttcagatgctctttggattttgaaatatttgcatgtacataatgagagatataaggggatggggcccaaatctaaacaggacatttatttatgtttcaaatacacctgatacacatagcctgaaagttattttatacaatatttaaaataatgttttgcatgaaacacagtttgtatacattgaaccatctgaaagcaagtgtcactatctcagccacccgtgtgggcattgctgtttggtatcactgttattccagactctgaatatatatgctagtgataaaaatcatttttggccaggtgcggtggctcacgcctgtaatcccagcactttgggaggctgaggagggcagatcatgaggtcaggagatcaagaccatcctggctaacatggtaaaaccccatctctactaaaaatacaaaaaattagccaggcgtggtggcacgggcctataatcccagctacttgggaggttgaggcaggagaatcacttgaacccaggaggtggaggttgcagtgagccaagatcatgccactgcactccagcctgggcgacagagcgagactctgtcttaaaaataaataaataaataaataaataaataaataaaaatcattttcttacacttatttgcatgagtactgatcagtagaaaatatggcatgccatccagtaccattcaggaccacatgggcaaggacttcatgactaaaacactgaaagcaatggcaacaaaagccaaaatagacaaatgggacctaattaaacaaagagcttctgcacagcaaaagaaactaccatgagactgaacaggcaacctacagaatgggagaaaattttgcaatctacccatctgacaaagggctaatatccagaatctacaaagaactcaaaaaaatttacaataaaaaaacaagcaaccacatcaaaaagtgggcaaaggatatgaacagacacttctcaaaagaagacatttatgcagccagcagacacatgatgatgtgctcatcatcactggtcatcagagaaatgcaaatcaaaaccacaatgggataccatatcacaccagttagaaatgcaatcattaaaaagtcaggaaacaacagatgctggagaggatgtggagaaataggaaagcttttacactgtcggtgggagtgtaaattagttcaaccattgtggaagacagtgtggtgattcctagaggatctagaactagaattatcatttgacccagcaatcccattactgggtatatacccaaaggattgtaaatcatgctactataaagacacatgcacacgtatgtttattgtggcactattcacaatagcaaagacttggaaccaacccgaatgtccatcagtgatagactggattaagaaaatgtggcacatatacaccgtggaatactatgcagccataaaaaaggatgagttcatgccctttgcagggacatggatgaagctagaaaccatcattctgagcaaactatcgcaaggacagaaaaccatacactgcatgttctcactcatagatgggaactgaacaatgagatcacttggacacagggtggggaacatcacacactggggcctgtcagggggtggggggttgggggagggatagcattaggagaaatacctaatgtaaatgatgacttgatgggtgtagaaaaccaacatggcacatgtatacctatgtaccaaacctgcaagttgtgcacatgtaccctagaacttaaagtataataaaaagtaaataaataaaacatggaatgccatcaatgcagtgaaaacataatgtgttcagggcaaccaagctgctcagtagcatccctggaatagctgaatcagctgcttaacagcagtagcaacaaacaacagcaggttttcaggctccacctacgatgctgtgttttgatgaaaaggttactgtgcactgtattttatttttttagatgagaagaaacttcagaagcaattgagagaccaggaagtgggtcctctggggctcaggaggcattctgatggatggcttttaaagatgtttcctccagaatcaactgcctcgttaaagcataaatgtcaagcgtaaattgttcttgtcttagaagtctctctttgactttataaacctgatatgatttattgttctgttatgaatgcgtggtgctctagtccttcaatgagcccatcacacgttttcattatgtcgtctagaggcaatttttctgcagtgttaactatgttatcttcagcattgtgcacctgcattttgactgcgacccatcacacgaggtcaggtgagaaatcttccacttgtggcatcatgttggtgcttaaaattttcagattttggagtattttggatgtgaaattttaagattagggatgctcagcctgtcatagatggtgcagccacctcggaaaacagtctgacagttccttgaaaggttaaagatagagttaccatatgaccaggcaattccactgggaggtatgtacccaagagaagtgaaatacatgttcacacaaaaacttgtacatgaatgttcatagcaacattattcatcataccccaaagtggtgacaacccatgtccatcaactgatgaatagataaataaaatgtggtatatccacacaatggaatattattcagcaccgaaaaagaatgatgtactgatacatactgccacatggataaaccttgaaacattatctaagtgcaaaatgccagtgtgaaagcaccacatatggtatgatttcatttatatgaaatgtccagaataggaaaatccatagagacagaaaatagattggtgatttcctagggctggaggtgagatgaaatggggaatgactgctaatgggcatgggtttatttttggggtgatgaaaagcttctaaaattgattgtggtgatggttacacaattctgtgaatacactaaaaccaacgaagtttgcactttacatgggtgaattgtgtagtatttgaattatgtctcattaaagctgtaaagaagaagtaattgaagaaatcagaaaggaaatgtattagataaacagaactgataggctatatatagatgtaaagaaagggatttattatgagggattagctcacataattgtggaggctgagaagtccctccatctgccatttggaagttgaaggtccaggaaagccagtggtatagtttcagtcccagcccaaaagcctgagacccagaggaaccaatgatgtgagtctaagtctgagcccaaagacccgagaagctggagagctgatgtccaagggcagaagaagacggatgtcccagctgaagcagagagagccaattcacccttcctccatcagctatttgcttgttaatcctgattgtgcaaatagctcagtgtgcaaaatatatgtctaagagggagaggaggctgggcgcggtggctcacgcctgtaatcccaacactttgggaggccgaggcgggcggatcacgaggtcaggagatcgagaccatcctgactaacacggtgaaaccctgtctctaataaaaatacaaaaaattagctgggcatggtggtgggcgcctatagtcccagctactcgggaggctgaggcaggagaatggcgtgaacccgggaggcggagcttgcagtgagccgagatcgtgccactgcactccagtctgggcaacagagcgagactccgtctcaaaaaaaaaaaaaaaaaaaaaaaaagacggagaggacacacaggagatctgggcgacgaactagctctgttatttaaacaaccattgtaaaagttgtttatgtatccaggtggagagccactgatgagggaacttgctgggcttagtttctgagtctccaccaaacctgtgccttctgctaagctggggatctgctagctgcctactaaaggacgggtgcctggaatccactgacagtttcacatacggtgtgttctggggcatcagccacctagctggggagagggccctggctcagaagactatgagggtgcacaggaataactggggctccgtcacccaagggagggtgcctgtaggactcagtttaagggacagtttcaacctcctggtgccatctttcacttatgtcccacacttccagttagtcttgtgcctcatctaaataaccacaccctgatatttgccaaactggaccatgagcatcccctcagattctgcttcaaaccatagctgagcaggcaactccgtataggccccaaggcatgtgtatttctgatcaagtcctccacctactggtgacacttgattctcacgtccctagggtttaccaacaacacttgtctttccagactgttctattagagtgtatgctgacactcctccataacgacaacaacaaaaaattaatgcctgttagaggcgctatccatgaagcagcaacaggagactgactgcttttgctatgagccagagtctgatgtgataaaaccagaaacaaaaaccagcctcttgtcttggtgaaaaagggggccactaggcaaaaggatggcgagaaaggccacctgcattcctcattcaaattcttcctcattccttgatttctctcaacaggtagccatcaaatctgagattcggtgttgttataaatctcttcaagaatattggggaagaggctgggcatggtggctcacgcctgcactttgcgcctcccagcactttgggaggctgaggagggcagatcatgaggtcaggagttcaagaccagcctggtcaacatggtgaaaacccgtcttctactaaaaatacataaattagctgcgtgtggtggcaggagcctgtaatcccagctacttgggaggctgaggcaggagaatagcttgaacccgggaggcgaagtttgcagtgagctgagatcatgccactgcacttcagcctgggaaacagagtgagactccatcttagaaaaaaaaaaaaggactattggggaaaaaatagcaaaccctggacatttcagatcactaaactaccccttgtgtgacttgctcaaaataatgttattacaaactcatggaatattactggctttaggcgatgacacagttgcagtaatgttctgatttgattattcagaaatgaaatttatggtttaaatttcatccaggatttatagaatttaaaaaagttattcttcagtatttgaaataccactttgccaaagcagaaaagccataaatgtgttaaactggctaagaaaattaagatggcagtaatacattttctaataaaaatcatagcataatagcaaaattactgcggaaaaccacagttattgtggcaaagacataaaatgttacagctgcaataatatgctatttgttttggcaggagaataagaatactgtacattgcagtttttcaatattggaaaaacataagaaaatactataaacttaaaagactattttttaaaaatgaagaagtgcatgaatgattttaaattttgagcatataaaagagtcttgctgcaaagtctattgaactcctgagaagactctgttttgctgtttctgatttgccagtatcctaccagaaaactatgcctcccaatagaaaaagaacacataatcctgtctgtatttgagggttcaagcctggagattccgcccccttggtcggttgatttttattggaaacccaagatgcacctgcctgtggaatgcatttcagaatgtggaagtacagcaggaagaaagcagacaagaacacaatcccatggtattcttggttagggacagcttgggggtcagtgggggagacatacacagattaaatgattaatagagtaattcagcttatttacattagtctggttttttacatgaggggctcacaaattcttaatttgtcctttctttattatatttttcttttttgctatctttcaatattgattatccatttcttcccttaattactagactttctgaacttttaaaaacatatatcttccaactggaaagtatctgtcccttataacaactaccagtactactcataaaacaacaaaaacccatatagcacttaataagtgtcagtcagtattttaaacagtttatgcatattattcatttaatcctctcaatgaccctgtgagaaggtgccattattctccttatttttcatacgtggaaagtaaagagtagggagaaactgtccaagctcacacagctagtaagtcatagagctgagactggaacccagatagcctggccccagagtccttcactattctgaatttataaagatatttttgatattttcttcccaaagttttaaagctttccttttcacattggagttttaaatctatctataattaattttgagtatggcatgatttaggtataactttttatatgaaaaactaattttcccagttctatttattgatatgcaaatataaaatgtctctctttctctctctatatatatatctgaggttgtttttgagtgctttatattcttgctttggtctgaaaattcacaggttgaaattctaactcttgagacgatggtattagaaagcagggcctttggaaggcgattacgtcataagggtagagccttcaggaatgggacttagtgcccttagaagaagctgagagaccagcgttttctctcttccatcatgtgaggacacagcaagaaggcaccatctatgaaccagaaagtgcccctcaccagacatcaaatctgctggcaccttgatcttgaacttccagcctttagaaccatgaggaataaatgtctgtttttataagtcatccaataggtgatgttttgttatagggcctgagtagtcttagacagttacagatgattcgctctcactgactgttgaatattattctaagtgtggatattacacaatttatttacccattctactattttaattttattttttttaatgtttgagacaggatcttggtctgtcacccaggctagagtgcagtggcacaatcatggttcactgtatcctccaacttctgggcttaagggttcctaccacctcaacctcctgagtagctgggactacaagaatatgccaacatgcccagctaatttttcatctttaaaaaaaaattattttgtagagtgggatctcactatgttgcccaggctaatcttgaactcctgggctcaagcgatccttctgccttggcctcctaaagtgctgggattataggcgtgagccactgtacctagtcccattctactatagatgggcatgtgggttgtatccagttcttttactattataaatagtgaagccatgaacattctcctaaatgtgttttggtgaacatgtatatacatttctgttgagtatacatccaagattgaaattgctgggtcacagactacacatatgtttctgctttagtagatgtcgcctgacagttttctaaggtgggtgggccattttacaccccgaccagtagtatatgagggtccccgttgttcctcactcttgcccacacttgatagtgtcttcttccctttagtcattcttgtgtacacaattgtggtcctaggtgacattttcttgataactatttgaaggctatcttctttgtgtggtgacataattgctcataattctgcccatttttttcttttgggttgtctgacatttaatacaaatcgctttgtaggagttcgttatataatctgaatgagtcctttgttgaatacatgtattttaaatatattctcccactctgtggcttaacttttcactcttaacactgtcttttgatgaacaaaagtttttaatcttttttattttttgagacagagtttcactcttgttgcctggggtggagtgcaatggagtgatctcagctcaccacaaactctgcctcccaggttcaagtgattctcctgcctcagcctcctgagtagctaggattacaggcgtgcgccatcatgctcggctaattttgtgtttttagtagagatggagtttttccatgttggtcaggatggtctcaaactcccgacctcaggtgatccacctcccttggcctcccaaagtgctgggattacaggcatgagctgctgcgcctggccgaaagtttttaatattaatgtgttttaatttacttattttttctctatgattatcacattttttgtgttggttaaatagacctttggctacttcagtttcatgaaaatattttcccatgctctatcacaaaagttttactgttttattaagttaaaccatatgaaattactaatagtcaacataaaaaataggagtttcatatggtttaacccaatacatttaatctatgatctgtctggaattgattttcatctttggtgtgagtcaggggtcaagattttaaacaaatttaattgtctgattgtcaatttcttatgaattggatgactgtatatatgtgggtctgtttctcaactcaccattctgttctattgttttttttcattcttgtaccgataccttactgtcttggccactagagttttatgataggtcttttataaattttaatagctccgaagtgttcttcaagattgccttagctactcttagcccactatgtttccatttaattttagaatctcttgttttagaattattgctttatatatatttaagttgacatgtaataattgtacacatttatggggcacatagtgatgttttggtacatataaagtatagtgatcagaataacaagaattagcatatccatcatttcaaacatttatcattcgtttgtatgggggacatttgatatcctccttctagctgtttgaaaccacatattatttttgactacagtcatcctacaatggtatagaacactggaacttattcctccttgacgctattttatatgatgccctctactctagaattgttgttctaaacaacagaatgttagttactctcttttctagataatcagaatgttagttaccctctttattgttattttgtctaaaattgatgtggcgatcctagattttttttttggttcctatttgtctggtatatctttattcatcactttattcccttgtcctccatatgttttggattatcttttataaatagaatgtaactgattttttttctttttgagacagagtctcgcactttcccccaggctggagtgcagtgggacgatcttggctcactgcaacctccgcctcctgggttcaagcgattctcctgcctcagcctcctgagtagccgggattacaggagcccaccaccacccccagcattttttttagtatttttagtagagactgggtttcaccatgttggccaggctggtttcgatctcctgaccgcatgatctgcctgcctcagcctcccaaagtgctgggaccacaggcgtgagccaccgcgcccggccttttttttttttttgatggagtttcgcaacctctgcctcccaggttcaagctcttctcctgcctcaggctcccaagtagctgggattacaggcatgtggcaccacgcctggctaattttgtatttttagtagagacagggtttctccatgttggtcaggatggtctcgaactcctgacttcaggtgatctacctgccttggcctcccaaagtgctgggattacaggcatgagccactgcgcccagccaaatataactgatttttaaatctaatctgtttttactgtgggaatttgagccattaatattattatggtatatttaggtttgtatttattatcttactccatcatgaattttttttatcccaatcaccttcttcattttaattctaagctttctgaggtttgttttgtggagatggggtcttgctgtgtcactcagactggaatgcagtggtgcaatcatagctcagctgcggcctctaactcctcggctcaggtgatcctcccacctcggcctcctgactagctgggactacaagttgcatgccaccacactcagttaatttttaaatattttgtactgatgagggtcttgctacgttcatcaggctggtctcaaactcctggtgtcaagggattctcccacctcggcctcccaaagtggtgggattacaggcgtgagccaccttgcatggccaacaggatctcttgatagtatgtttccaaaaaaaaaaaagatcatcaaatcagaataccacacaaggaagctttgctaacatgagcttctgttcttcgcctatggaatctgactgagtccatggtgctggatttggtgaagcgttggacaaaggagtcatcctaggtacataaacaagaggaaagtacaagtgataatgagggaaacagcaagttcatcatgaactacagataacctctactttcatttcttttcctgtctagcttaggtgggttctggtaattcccctgggaatgaagtgcccaattcttatttcttttttttcctttttcttttcttgtcttttttttttgagacagagtctttctctgtcgccgaggctggagtgcagtggcgcgatctcggctcactgcaagctccgcctcccgggttcacaccattctcctgcctcagctttcccagtagctgggactacaggcgcccgccagcacgcccggctaatttttttgtatttttagtagagacggggtttcactgtgttaggcaggatggtctcgatctcctgacttcgtgatccgcccgcctcggcctcccaaagtgctgggattacaggcgtgagccactgcgcccggccggcagagcaatttttacctgttctctgaagattttccagctcactccaggcgacatgttttctccatttcctgactgccagggtgctagggggcatcatcaccaggttttcaagtatgttctgtgttctacgatggtttcctgttgttaaccctttcatcttactatttctttgagagtagaagccatgctttagtaagtgcttaataacacccaataaatatttgtcgactagtccattagttgaagtctagccccctaagcctccgtttttccccaggaaactgtcagtccccaactctgttgcttgccttcacaagctaatatccacactacagaaaaggaccaaagaggcaggattgggccccagatatggataaatcattgtggccagatatatctcaggacaaaagtgggaacttggtttcttggttttggagagctcattggctatagagtactgcaaacatttttgtacttaagtgtcattttaaagctcaagttggtttctctacatgatatggtctttttctccctaccttgggaaattagtgttattttaaaaatggtcttaaaacatattgatgcccacttgtttttcataaggaaatatgaaaaatgttcagacttcaccagtggttaaacaacgcaaatggtggcaacttatataattagccaacctgttttaaaacgaaattttgctatgctggtgaggtcttggcaaagtgctacatccatatgtagccagttacaatgtaagttggttcaaccctttgaaaagcaggtagcaattctgatctaagaaccataaaaatgtttatttctttatttttgatcaaatagtcctaggttctggaatctatcctagacaaagcatctaaagggagttgaatgctctgtgtttgaaaatgttcactttaatctttatttttagcatggaaaactgggaaacaagctactaataactaccacttgtctggctctgcagttcacaagcagctgtcacatgtatcatttcctttgattttaccgtgtccctgggaagtaggtgcggttgtgacccttgcttcatggatgaagagacatgttcagagtggttaagatacacagatcacactgttggaataaaagcagaacaaagctgaggttttctgattccaggggctgatcgtgcagtatgacatccctttatatctgtgtctggcaacagggtaaatgttaacccaggaacgtgagtgtaagtatctagcattaacataattattttgaaagcaacatagcaatattaaaaaatactaggctgaaaaaaagtacaaaaaaatcacatatttgctgtaattattacataaaattagatagccatcatacttaaggactggaagggaagggaagaaatgaaagtcattgagaggtttcctttcattttagtaccactgtgcttatcatttcatattgctgggaaccatctggcactctttggctcttgaatggaatcataattttcttaggaaaagttatatatatagaaacgcattgcaccgggttgcactcgctttgagaacactaaatataaaatttcctggaattatagattcacagagtcacaaaggcctatgagggaaggaccagtgctggtgacagagagaggctgagcgcagcagtccccagcccatgttctggctgtttcatctcaatgacacttgggaagcgaaccttgtgtggagcatggaggggtgggacctccttgtgaggctgacaaaagagggctgggcttgccaaatgaaatcaggccttgggagggtggaggagcctccattgtcctcagcgccagtgattaaatgccggattacagaggaaacattctttccatcctccccagcccccaacctcagcccatcaggcccattcacaaggctccttcccccaaatattggccacggtgccttctatttatcaccctcacagaggacactacaacccacacaaaggggcttcaggaggctaatgtaaaccaggtaatagaagaaatcaagagctgacacctcaaaaatgccacaggggctgtggggcaaaggaaaagacatatggtgtgaaaagcacctcccagacgctgctccgctctcacgctctgcctgtagttggcactcggttattttcttgtaccttctactggccaagcactcatgccttgctgcacatctagctagttttctctcttttccagacgagacatgtcatgtcgggtagcatcatttgcaacagcctcgtcatccagctgacatggatatttggttctcctttgttactaaggccttgcctttccaggagcatccacatagactctgccagaatgtcatcagactaggctagtatcttgggctcagcttaatattctctcagcctgacatattggatcacagcagttaggacagaaattttgaaaggttggggagagagctgtatgggaatagtgcctggaataaatagatacaaacattttagaactactgcatagacctagatgttcatcaaagtattcatttgctttttaaaaggaaaatattgtgaagtgtcttccaaataggcagtgagtaaatacatgctgcaggtggaatgaacgagtgacttagggaatcagaacacaaactgtcatgccagattgcttggactttgtgacttactacctaagtgaccttgaacaagctcagtttccttgtctgaaaagtggagataatggtgatgataatgatgatagtacttgcctcacaggattgaaagcattatgtaacaagctctcagatcatcatctgttacagaatacatgctgtaggaagtgtgagctactattattattattacttgcttacagcaaataaatcctagaggtgtattagcagcaccaactttcctacagagccaaagaatatagaaatgccagtatggagagggataattctgattatttcttttttttttttttttttgagacatagtcttgctgtctcccaggctggagtgtggtggtgcaatctcagctcactgcaacctctgcctcctgggtttaagcaactctactgcctcagcctcccaagtagctgggactacaggcgcatgccaccatgcccagctaattttttgtattatagtagagatggggtttcacagcgttgcccaggctggtctcgaactcctgagctcaggtaatctgcccacctcagcctcccaaagtgctgggattacagccatgagccactgcacctggccctgattatctctttatactgtatgtccttaagtacaattcttaaagaaaatactagcacatagaatttagaagtttgttgaaatgcaaaaatcataggaatgcaaggatggcttgctattatgtttattatcataatttactatattaataggtaatggaagaaaaaacccataattatagttttgtgacccaaagagctttttttgtcaaaatttgacaatcatttcttcattttaaaagtttcaattaggaatagattctggacacaataaattaacatgtaaacacatatgcacgtattagttgaaaaaccatcatgatgctaaatggcaaaatgctaaaaccattttttccgttattaaagacaatattggtcaccatggaaactatttttttaatactgttctaggagtactggccagtgcaattagataagaggaaaaaaagctgtaaatatggggaaaattatttgcagattacatcattatatatctctaaaatccatataaatcaattgaaaagctgttagaaataatatgactaagtacctggttataaagttagttatacaaaaattaataggctttttctgtacataaatataatgggatgaattgatcaatttcaagtctgattggctggatgatttttttttcctctgcaaaccagaccttctctgcctctgagcagtggtctgtaacaggatgaatttctgttggatcagctgaagtggtggcttgggcagtgaggcaattcttcatcaagacatacctttttgttgcttctaattacctgctggcaggaactaaaagtgtgtctcttgtatgcatgccatgtgtgtaaaattagagtctttgaaattgttcaaataaagaggattagttatagttgtagggagatataaagactaagccaaaagaagcagagtttatctgccttcacacttcacccatctgttaacccggctgagacacattttcttgtagcattagtattttatgcactgtttttcttgatatagtaacagatttaattcattctttatggtaatagatcccttgtatccataaagaaagaacatattccatcattaccttaatatcatgtctaatacagagtggccgtacaattggaaagttatttctcagaccactaaacttacacataaatgttaaacactgtatattacttttaagcttacttttgatctgctatcaaacctaagaagttgttttattttgattaactctatataatagttaatttttttcctctaaaatgtgttttaaaggctgaagctgtatttgacatcatttttaaagctatgtgatttattcttttttattctccactgtcaaatatacatatttgaagatatgtatggtaataccattttcaagcactagctagtttaaggagcatagagcatggtaagtgatataaaacttcattcacccataaaccccaaacccctagtactgaatgcccacatatatcatccttactatcagagaaattatgtttataacatatgctgagttcaagaccagcctgggcaacatggcaaaatcccacctctatgaaaaaatatgaaaatcagccaggtgtggtggcgcacctgtagtcccagctacctggggggctgagatgggaggataacctgagccctggcaggtcaaggctgcagtgagccatgattgtgccactgcattccagcctgggtgacagagtgagaccctgtctcaaaaaaaaacaaaagagaaaagcattcagctttttgcttcctacatgtatgtcaccacataaacaaaggaaagtgagactcaagttaccgtaaaagagtccttcactggaagcaaatcctcaactgttttagaaaaatgagtttatgatcattattattttgctaaaaggattctttatttcatcacaggaaccttctactaaccccctttagtctaaaaaagctctaatctataaaaattaaaaatatatagatcaatttgatccttatagtttatccatccaataattttttggttaatatttgcatggcagataaatctttacttcccttatttctacctcctgtattgagtgctcaatcaacttttaaataaattatcacatgtatatatacataataagattacttaacattcctatgttgaattttgaatttgtttcatttgttcattcattcttacatccaacagatatggattgcaaacctactacatggcaagcataagtgccccggggttatggcagtgaacaaaattcttatcctcatacagtttatcttctgatttggtggatatgagaaactggtgaacttaagcttaaaatcaatcagatgctgagtttgttattaaaaaacagaaaagagagctcaggttaaatacatgcactagctaatctaaatctttcttggaagtagacttggtactagtctctcaattatcaatcatttgggcattctgtgatgattttattatatccttaattgcattgcagaaatggaaaaaaaattatctcttccaattgccgttcccatctgatgagtccttcatgggagcaacaagcagctgatttgccatcagctttgtaccagtgtaggggctattttggcaacaacatatgctttggtgtcagagtaactgaccttcgaatcttagctcttactatgatattgggctagttacttgatttctctgagcccattcttccatctgttaaacaggcatattaatcctgctttaaaggagtataattcagattaatgaaataatcggtgtatagtacctggcaggtcagagctcccctacccaaggtccccatttagtggcagagccaggattagatcccacatcacctcactctggtgccagtccttgtctcgtaccatgtttacatttaataatctctggtgattttactcacatgacgagacaatagatttattcatcatttattaagaagacattgagttctttgctgtgctgcctctttgacctctctgggccaaaaatgagggagttgtatgaggctccagggtctcttttaaccatgcacttctatgactctatgcagggtggccaactgtcttgatttgcctcagactcaggggtttccctgaacagggactttcagtactaaaactgggagagtcagagaaaactaggatggttgttcaccataactccaggattcttccacatttggtttattccatcagcttccctgatatacctctgaatacccgagattggacataatcctgcaaaagaattcaaacatcaagttagcgaacagagctgcagccatgtggcctctccacctcttcattcactccttcttctgcctctgcagtttcctatctgggtgctgctttgggaaactgtttttaatcattcattgctatggttttagttttggtggctagccagagagcagctgatcagccatgtcagcagactaaggaacactcacagatattttcttctctgcaaggcttgatgtctccgtttaccttgggaagaaagcagaatgttcacaatctcactgcctctagtctctctagtgaatgtaaaggcaagttccttctcccactcctcctctgcctcttcatttttattctctttctcattattattatcattactaccaaaaggcagtcacctctaggggaacaacgaccaaatgagaacctctcagagcacagtgttttgatgctgagcagaggctgcacaccttgcaacccgctccctggtgggaagaccggctctgcctgccccagctgagatatcacttaacagtgcgggctcttcaggggcagggccagggcctcctcaacatgtttacaagatgtgtggctattagcaacatcttacagctcagctaattaacggggagagtgcctgatgaagcctggctctaaagaggaccaaattgcatcagtgtttgggctttaaattgataccaaaaaataacttaccgcaggtgtgttttgaatcgcatcttcccccagcaggttggttggttgttatgcttcagctaccgcagatcccaaggtggcccgaacgccagggttacgagtttattaagatcatttaagttggttacatgtagtcattattttagctgagcggttaagttcgtacgtggtcactgatatggtttggacctgcgtccccaccaaatctcatgtcaaattgtaatccccattgttggaggtgtggtctggtgggaggtgattgtttcatgggtgctcatgaattctcataaatggtttggcaccaccgccatgatgctgtcctcaggatagtgagtgagttctggtgagatctggttgtttaaaagtgtgtagcaccatctccctctctctcttgttcctactccagccatgtgatgtgcctgctttccactgcccaccatcattggaagttttctgaggcctctgcagaagctgagcagatctcagcatcatgtttcctggacagcatgcagaactgtgagctaatcaaaactctttttttttgtttgagatggagtctcgctttgtcacctaggctggagtgcagtggcatgatctcagctcactgcaaccctgcctcccaggttcaagcgattcccctacctcagcctcctgagtagctgggattacaggtgtccgccaccacgcctggctaatttttgtatttttagtagagactgggttttaccatgttggtcaggctggtcttgaactcttgacctcatgatccacctgcctccacctcccaaaatgctgggattacaggcgtgaaccaccgcacccagcctcaaaactcttctttgtaaattatccattctcgggtatttcttcctcttttttttttggacaggaagtaggatttattagtgagtattaagagggggcagcacagtcgaagccctcatgagtgcagggcctgccacttgtccagagggccacgactagggatgtacttgatcccacagccatctgggatgagccgcttctcagccaccatgtcttcaaattcatctgcattgaacttggtgaagtctcacttctttgagatgtggatctttggggtggccagggaacttgaacttggccctgcgcagggcctcaatcacatgctccttgttctgcagcttggtgcagatggacatgataaccgtggtacaatgtgaaccccggccacagtgccctggggttttccaaaggcacctcgcatgtctgtttggagcatacattggggtaatacaaggtcagagacatgaacatccatctgaagggcctgtctccaaggtcccttagagcaacgcatacaagaaacaggctgcgtacactaccaaggaagctgctgtttgcagccattgcacacctggcccccgggaggaaaggaattcagtcagcttaattggttgcagattgggtatttcttcatagcaatgtgagaaaagactaatacagttgccaacccccatgaatcctataccaggagccacctcgtcttgccacagctaaggatatgatctaagtcttgtcttggacgagctcactctccactctgtggcacacatgttttcctttaaaatacccctgttattcaagcaggaatgaaatatttctctcacttttctgattgaagtctttccatgctgaattttcttaatcagaccagtaggtgagttccatttcttatataatcttccttttactaataatctcttcagtagataatgaccttagcaactgttgacacaacttcctctatttgaagttttaaaagttttgtttggtcaagaaaaataacttggaattttgaggtcacttctgtggctactcatggattgaattgtcctggttacctagtgatttattgctttttgcccactggtaggaaggaggttcccaatgttggaggtgtggcctggtgggaggcgattggctcatgggtgctcatgaattctcataagtggtttagcgctaccccttcgatgttgtcctcaggatagtgagtgagttctggtgagacctggttgtttaaaagtgtgtagccccttccccctctctctcttgttcctactccaaccatgtgatgtgcctgccttccaccgtccgccatcactggaagttttctgaggcctctgcagaagcctagacatggtagaacccacgtctgttttatgaagggtaaaatagcacccctacgatactgtatcatgctgccagagtttaataaattggggtaaaaaccagtatttcccaactctcaagggaaaaggctgtgttatttgtgaagtattatcagtaggatgattttaccaaggcatcttggttcattctcagtgttgaggagatttctgtatccactgggaagctgaccaggcatcatctaagatccttttcggggtagagaacatgccagcaccagtggctactcttggacagaaggggaaggttggtaaaggagtcagctgacaagactttcacttttatttttatccccttcagttgattttgaaaaatgaaaggtcatgtcttgctgttgaataataataataataataatatcttttatttaattttaattttaatttttgagacagtctcactctgtcacccaggctgaagtgcagtggtgccatctcagctcactgcaacctctgcctcctgggttcaagcaattctggtgcctcagcctcccaagtagctgggattacagccaccatgcctggctaattttttttattttagcaagaaggggtttcaccacgttgcccagggtgatcttgaactcctgagcttaagtgatccttccgccttggcctcccaaagtgctgggattacaggcgtgagccactgcgcccagccaataataataccttttttcaggctgtgattcaaatgttcccttagttctcttagttgtgtttacctctgagcagacataaaagggggctgtggacttagggctgcccccaggaatggtggcaactgtgtggtcataagtgacaaagggtcacatacaaaccagaaggtgggaggtgacccatgcagtctccaaccctgcgccaaggctggtcaagccctcttattttgggggcactttgaggggagggtgggataagagttgcagttgcaagagaggtatatggctcaggtgacctgctacctatgatatgacatcattcctttcatgctgagctcacaggggcgctgtgaggtttgctattcactaatcacacgttggctaatccatcacattcatggagcaaaggtcagccacatacatgcaaaatagcaaccaaacatcactcctaatattgcctaatgactttctcttgaaagtcagacttgggctggcctcaccttccagtatcatctagctggtgcatcaaaaactacgagggttctaccggagccaccagaggctgacacagctgcccttcaccagcccctctgcgaagtctgtcctctgtctctcctgaggacatcctctccccctccagcaggtcttttagccacatgtctttattcttgccttgattctaaaaccatccccagtctgcttttgcctaatagagagggagaaaagtctattgctttcttttcttttattcctactccccctggctttttttgagtcaggatcttgctttgtcacccaggctgaagtgcagtgaagcaatcacagctcactcactgcagccttgaactcctggacatagccatcctctcatgtcagccttccaagtagctaggactacagatacatgccactatacccagctaagtttttattaaacattttttatagagacagggtctagtctcaagctggtctcaagctcactgcagcttcaaactcctggcctctagccatccttccacctcggcctcccaaagttctgggactataggcatgagcctctgtatcccctggaaagtcaatttctaagagctcagcatccatccaggtggaagaggtgaacataggcatctctcctctgtgatcactgccactgcaatgggagaacaggaaaagatggcagttgatttctgtcctttcatcatgagtccatctactctccttcccatctcacatcctggacttgcttccgacgacaacgttatcaagcctgcaattaaaagcaaccacttttatgagtcattgttttgcgaaagcaaatacccttaatatgttgattcagaaggtttcaggggagccaccatgaggccacttgtgcaatgccaggctaactacttttgaaagaggaccatatgctgcctttacaacatccctttggtgtttaatttgatgaaacaatgtgccacaatcagctgtgaggacagcagccgtgattgatggagactgactcacgtggtctgactctgatttcaatatcaccgcgctaatcccattattcgcttgagttggcttgttttgggctaccttaaaaaaagttatttctttaatggtcaaattgccgtgaggtctggaagatttaatgtatcataaaactcattaaataaccagcctggcagcccacaccactgggtagtgtgctagcatatgggagatccaagctgaagacttcagcattcatttcaatgccacccagccaaagcctcaagggacaagtctggagtgtgtgttctaagccagcattcctccaactttcatggacgcatgaatcatcggagtgctttacgaaagtgcagattctgattcagcagttgtggggcgaggcttgagattctgcattgctgacaagttgatgtccattcttctggtccaaggcccaaactttgaacactagtgaacattcactagagggtcttgtgaatatccattgacagcagctaacacttatgaaccacatgactgtgttgtaagtactgtatgtgtgtgttatatgtgtctgcttatttaatctttacttttaacctcatgagggagatattattatcacctccatcttctagatgaagaattaaataattgaatacctaagtgaataaactaaataactgaggccacacagcttggtccagtactttttgccttttaggcatgtttatgaatctgtgagatctatttttagaagttaattaccaagtctactttttttccagttaaatgcctaggtcatggttattgttgttctgttacttatgaagtaaaataagcagaataaaacccaaaaaacacaaaataacctatttgttattttgaatcttttaaaatataacatcaacaatacatttttcacattaaaaaatctattgatttgagaaaactgtacttaaaccatggccccagggtgaacgaatggtgagcgggaataaaataaaattcaaaaccatgtcccctgactgcacagcctctttgttttttgtttttgtttttttccaacctcatcattacactcctttcacataggactcagtgccctggccccatttttagttagagaacggtggctcttgtatagatctgccatgggcttgtactgggtaaaacgatgaaatttgtcttgggggctttagacgtctctttctggatccctttctctaaaagataatatttaccacagcaggatgccgctaatactgaatcaaagcaatatgtagccaagccatgagcagctaatatcctaacctgagccctgcctggaagtggcagccgtgttagcctctctggtgctttatgttgaatgggtgctcggggtgaagggactctggcagccttcccagaaagggagatggcaaaagagaaaacaaacaccttctagaggtttctggggaacttagggaatcctagaaaacctgtgtaaggtaatgcaagtacgtttctcctcccatctgttttaattggcattcccactcaccattcatttcaccctggggccatggtttaagtacagttttctcaaatcaatggattttttaatgtgaattttttttttttctttttgagacggagtctcgctctgtcctccaggctggagtgcagtggcgcaatcttggctcactgcaatctctgcctcccgggtacatgccattctcctgcctcagcctcccgagtagcttggattacaggtgcctgccaccatgcctggctaattttttgtatttttagtagagacgaggtttcaccgtgttagccaggatggtctcgatctcctgacctcgtgatctgcccgtctcggcctcccaaagtgctgggattacaggcattagccaccacgcccggccgaaaaatgtatttttgatgttatattttagaagatttaaaataacaaataggttattttgtttttcggggtttttttctgcttattttactttataagtaacaaaacaacaataaccacaacctaggcatttaactggaaaaaaggtagactttgtaattaacttctaaaaatagatctcacagattcataaacaagcctaaaaggcaaaaagtactgaaccaatgttacttcagaaaactcagtgaacccacacaaatgccccattttgtacagataaaataagagttacgtgtcaaaagataaaccaggttacggcattacaacctttcctttagaaggaatgtgctgaaggggaagaacattactagactggtgatcaggaggcctgagatttaaccccatgttaatttgaacctcagcttcctcatctgtaagataagggagactgacatccagacctgacgttagatgaattaagcctcactgggggatgcaacaccaacctgaggtttactgatcgggtagctcattcagccacagccatcaccctctgttttccactgggcttttagatacatcataaaacactaggatttttctgcttcagccagttgcaattgctcagaaacctcataagaatatatattccttttttatctttttttttgagacagggttccccaggctggagtgcagtggcacaatcatggctcactgcagcctcaacctccccaggctcagctgatccccccacctcagcttcccaagtagcttggagtacaggcacttaccaccatgcccagctactctttctattttttgtagagacggggtttcaccatgttgcccagaatggcctcaaactcctcggctcaagggattgcctgcctcagcctcccatagtgctgggattacaggcatgagccaccgtgcctgtccactatttattctatatatatatatatgggaaatatttacatatatttgtttgctggactaggcattgtgtaacacataaattatccattacaataacagcatgagatgctgttctttccattttacagatgggatggggaagctcaaagaggttaagagacctgcccatggtcactgggtgactgaggctttaccaccatgaaaatctttccatgtaggtcaacggcatttccttctgtagagacctgtgcgccatgcccatcccttcctgctaatgatgcagctagctagcttgcttgcttgcttgctttagcctcagctcttttttagagtaggaaggctttgtattttagcctatagtgtgctattaacaatgctttccatcagcagcctttgtttctcataaggagtaagacaataagcagccctaagtatttattcatttctcttcaactcttgcatggaacttaggtcagctttagttttactcccctctgcgttctttgtaatcttgtggattgtatggagaaatctgccccaaacagatgacctgattactgaaacccccgcattttctgtggttttccattgtaagggaatcactgcactgtaaaatccataggaaaatgccatttctctaagcatatttctccaaaaagttttcaccaaacatatgcattttcttaacctgaagttcttcatcagtcccggcctctgtctttgaaacgcccaaaatgtgatgatgtaggaaaaaaaaatttagggttgatgggaaaggaatggattttagaggaagatgtttgcaaagttctgggagtggtaaggagaaatgggaaagggagagagaccactcgggtctgttctgtgtgcagccatagtattgtttgctattgagttgtttgtgactttctctcccattcccatcctcagatttaaatgaccaattttggcataaggactcacaggtgcagaacattctataggcttggacgacttcataaaaaatgattcaatcatatctgggacgaaggctgtcccacttattctctctagcagcctaatgctcttgctttattcagatttccaatagcaactgtcattgactttgtacacttatgcattgcattaagattgtacttattgtttggaactcttaatgctgcaaatacccgtgcaagacttagacgctgataagagaggaggtggtaaggaatgtttgaattaactcataactgctacttgcaaagtttccaaaaggtctgatttttaaaaattgtctttagcatatgtagaaagatgtgatcatgaactcactgaaatatggctaccctgggaatatattttataaagaagaaaagagttcttaattcaaagacactgggtcatgttgaagttgaaaaaattcttgtctattacctttttttcatttgtgttccctagaattcaataaaaatatatgctatcactcctgtccctgtcaactgctctgcctcagttataatatagcagagagttatttaacctaacccagactaaaaattatcaccacatcgagaaatcacctggtaaaagtatttactttctttcctataaagcattctctctcagtgatttttgcattagtttactttagtcacaaaatgatgcaaaccaacaaggaaaactaaaatggtttttatctaatgtacatataattgccgatgaaaaagtttcagaaatctcaattacccactgtattattgtaacctgttttaagcaacaggtactaaaatgaatagaaatgaatgtttttgatcactctccttccccctctgctccctatcgtttaaaatcacatgtcttacagtaattccattagattttcagctgcttttcgagaagcagggtgtccgagcacaacaaaatgtttcctgccaaacaatggttctgcttaatttgatgccttacccagaaacccaacaatattccatgagaccattacacactattttatccttttcttctctttttttaatgtttcacttgcaggagcagggaggggagggggaaaggctaaaacaaactaatttttggtcattttattcctttagcaaacagtttgaaggctaaccaatttgtacttacaaatctggggcattagcagacggggaccctaaatcctcatgcatgcaagcagtaactgtttgtatgccaagctgtttgtaagcctgatttgacaggagagagctattcattcttttgtcaactgtcagtctaaaaacgttaacctgcctgggtcccggggtatgggagcgctaaatcttccgtcctaccactgtataatgaacagactgtttcattagtgggacaattcactcgacaaatccagcccaaacaacttatttcacaatttgtgagcagaattaaatttcgggggagtcgcaagaggggggcgggaggggaggagggggagtaggtgagcggcacacaatatactgagggatcaatgtgttgggataagtgttccaggcaattttgctggcagttgtgggctgaggcttgcagggccaccgcatgcagatcagcggattagggggaccgcagcattaggtcaagtgtctcgaggggagctgataaacaccccaaacctgacaacagattttcctttcttcctgcaccacttgttaagtgtcagagcaaatcttttgaatggcagtggagtttacttagaggccctttcttcaagaagacactctatccattttctgaagcccattccaggctgcctcaggaataaatttgccccacatctcacacacacaaaaaaacgtctttttcctccacatcttgactatgagcctttgtctcaaggtgtgtgaaccagaacaaaaatccacatcaagagcccctaaggtttcagagcctctggatttagctttaatacaaattaaacactttgaagattacacaaatacttttttttttttggtcacagaaaagtctcattttaaacattaccaatgtatggattctgttaaacggagaaattttaagcagcaaagggtcatagaatgactagatcttaacaatatcctatatgtacattgctgttaattcaaacagagtaaatagccagcatgctatatttctttcaatttaagaatcccaaacaggagaagccagccatgcttattgtattaagttgtatctctgtgttaactcaaagtatgtgatagaaaatctgtgttgcaacatttaaaatttgcttactagttttgagcagagaagtttattttcactttgagatgttctaaaatgtttaaatagcctcaaatgtttgagggctttttgttgcagcttggttttgcattatggttttgttttttatttcttttggctgtttaatttttgatttggtatggtgtgcaaatctaatgtgaagttttcaagtgaccactgttaaaaggatcaagtaggaaagtcctctgaatattagcatgtcattttcccagacatttgcactggagccattttgggcaatcggtttgaagatattttccttttaataagtattttctatcaaatagagtcttatggaagagaaaataagtgttttggctatatttttacaatacttttttgaatttaggtagtggaaaatatgttactgaagtactgaacaatatttctgtgctggaccaacactatgataattatttcaatattattgatttctattgtgaactccacctactctatagagaatatttaatcaggcaaactagtacttatgccaaaaatgcttcttattctccctcttccgctagaaaatttcgcaggattagagctattatattatctagtagttacatctttggtgcctgaggatctcaacactaaatggaaccattacaggacattctacactcactctatacgctggattcctgttatatgaagagattcattattctttacctcattttcaccattttttaggaaagaaaaatgtactgtatttcactgtgctgaatgcaactgccaatcaagatagtctgcagcctacctgtggaccttaatgatttcacatgttctgcggaagaatttctcccccacctccaatgactatggcattccttgggaaagttagcttggtatttacttttccccagcaggtcccaagctgaccaaaaaaataaataaaaataaaaaataaaatcaacaacaacaacaacaacaacaaaaacacaaaacaacaatcagttagccaggctgtttcaatggcccaataagttccatgatagcaagaattctatgaataataatgggacatggaatcccatgcagcctcgcggagagctcagccaaatcacccggaaattctgcttcatcacagccctttctcttgccataaaactgcttgggctctgtctttgcttccacatcatttaagcctttctgccgaccctccagcaattccatccctggggcctccgcccgtcactatgctggggctccccagggcttctcaagaggctccgtcagctccatcctagaggcctcttcacagcaccagatgaagtccacacctccttttgtaggacgttcaagcaacacaggccagagtaaggatcaaagtaaaagtcatcctaaattcaccactgagagataccactgccggtaaacaggagactgctttttcggatgtctacgcatttatacatcttgcccagtaacaatggtactatatcatacataccattttcttttattttatttgtataaatttatgaggtgcaagtggaattttgttgtatagacagattgtgtagtggtgaagtcaaggcttttagtgtgtccatcatgcaaatgaggaatattgtacccattaattaatttctcatcatccaccccctcccatccatacataccattttataaatagcttgttttagccaacaatatgtcatgaagttttttttttcatttcactgactctatatcttcatattccttttcttttttttttgagatggagttttgctcttgttgcccaggctggagtgcaatagcacaatctcggctcactgcaacctctgtctccagggttcaagtgattctcctgcctcagcctcctgagtagctgggattacaggcacgtgccaccatgaccagctaattttttgtatttttagtagagatggggtttcatcatgttggctaggctggtcttgaactcctgatgtcaggtgatccacccgtctcagcctcccaaagtgccgggattgaaggtgtgagccaccgcacctggcccatattcctttttaaagacagcatcagagttcatcatatagatattctttaattatataattaatcccttttgtgggccatttgtgggggtgctcatttttttcttattagaaagaaagctgaaatcaatgtcttgtacaaataccttttgtgtacttctctggttagcgctttaagataaagacttaaaagaggcattgttagctcaaaggatatatatattttcacatatgtagttaagctgacctctggaaatttatcatattatgcaaatcctgtcagctgcttttcaggggcaggaatgcagtggggcagggaggccatatttacttgtgacacaggatttttcttggccactttgccaactggggacttccatggccagtgaccccctccctgcccagacgtcgcttagcccggcctgcctctggaggcgccctgcccacttggcccaccagtgttatagcttgtacccaagtttggtgattcctaagctcttgtgtcatgtccaagcagaaagaggatatgctgctgacaattgaagggtgaggatggatggagaagaattttattgagcgatggaacagctctcagtggagagggaacatggcgggggtggtcccccacccctgcactcaggtggtttctctctcccagtgtggctgagtcagggacttttatgggctcagaataggggagtgtgtgctgtttggtttgtgagtatgcaaagaaaggctaaagcaaaggcaccactaaaggtgggcacagcagtgtagaaaaccaattagaaaaaggtaagtatatgtaaaataggtgaggggtggggacgaatcagaggaaagtgtgccaaatgggaagacaggttctcaatccaatctgtggatttgacgtgtagcttggctttcaggctttaaactgtctttagcttgaaggtcaggtttcactggggacctgcccatatctgcctaggtatttgtctgcctcctgccgctatcaattcccccctctgaagaggtacctctaactgtcattaggataagaacggtgaccgatcttaactgcttcatgctgacaggaggtgccattttgggaaaatggcagtcagttctccctcagaggcctctctaagggtccctgacaaaagggagccattgtctgaggctccagttgcatgaccatttgcagtttgatggcctgaaggtgaaaagagacaaaccaggttattagaagacatgtatcaaaatgaaacaagggggtaaggacagttcaaaaatcccaaggttgccaacatgcccagataactgatggctatagttatgcctgctaagatttgagtgcatggagcttggctttggttagctcccttggtcttattttcccaaacaaagaaatcttggggttatgggcaccctatttactcctatcacctggcaggatttgcaggataattgcccagaactagaatattgatccagatttttacattacccagcccttctgtttcttctgagctgcagctggagatcactggttggttcacaggaataagcagggttagtctaaaatgcagacaaaaacttaaaaacaatgagactagaatttaatgtcaagtgtacgataagttttgaaacatatttttttctctctccagtcctcatttttgttaaaaacaaatcatgataggactgagttgtttgcaaaataaactttcatcttatatatggcttaattatctgcataaagtgcaggaagaataattattttcacataggcttttctaagttggctttgatgaaactctgttccagaagtaatcttagataaaacttttcaaagctgagctcagccatgggtttataccctcaaatacctatgatttgggtaaattcctctcttcctgaggttctaagaaagcttggggctgctgggcctgttagaaagtgacattctttactcaccacaggttacgaaccctgtaaaggaactgtgtagacaaggtgtgaggccaggtttcccaaggggcttttattggttctgcaagtcaagcttgattccctaaaggaaagtacatcattccagtcaaagccttggcagaacaaccagtttctccaattgaatattgttgcaaaagaaaatggattcttattgcactggtgcaaataactatattgccgtaagttaaggatactcgcaaatagtttccaaattctagagaaaccaggcagagagaaacaaatatgctccaaattttgttcacagtagtataccttactcaattgttaaaagttgtagatagctcaaaagattccttgactctgaaaaacaaaacaaggatcagcaatgttttaagcaaaattttgaaaacattacttcagttttctattgattcagtccaatatctgcttgatattcatgaacatttcagctcttcatgagtcctgaatgtttttcctttattccaatgtcacaatctccaaagatatcaggaacctgcatttaagagcacctgtcaaagttctatagctgattatcaaccatcttttgaaaaggaacaatacaagacaacaattatctgtgaatgacaaaatgttcaggctagttacagttaaaaacttgattgacagagaaatttggctacttgtatggtttacaataacttaacataataaccttaattatgattgataacatatactcagacattagaattttagaaatcctatgcaattttggaacatacattaatattattcaccaaaatagaacctgaaaattaaatgttatttttattttggcaatcccatgtaactaaacatgtcaaataatcctgtttacctctcttttggatgttccaggggccctctgtagcatccaaaagttaggggctagaaaagacaaccttgaagctaaagtttgatttttggggaagcctacaaacatgttaaaggtttaaaacatttgatattatgcaatagaattccaggttaccacaagtcatttatttagccaaaataatgatttaaaacatttttaaaaaggcaaaaacctttacatactaagagggaagacttagctttccaaacaatctgtcttgtcttcctccctcctttatttgaaaccttatagataattctatccaatcttaaccagtttgaccatgaggtgaggttcctataaaccttttataaccctttacaaatttttgttaaagagcagatcaatacattaagaaaaccctgttatgctttaattccaatgcttgatttacggaaaaaccaaatcatacccttttgaatttagttgatctcaaatgaagtttcttttacaagattaatttttaccaacctttcacaacttctttaaacctttagctttatcttatctgatttaaaacaattctttaaccctctaaactaggcaaaaatttatattcccatgccttcttataatattttaccaaaaatatattttactttctttacacaccttgcatgtaaatctatttttagtagtcccaattatgtgttataatggtaactcttagcaatttttaattttagtgtaaaacctggtaagctgttttaattatgtactaggtgcagctaagatctgacactttccagtatagtaagaggtatagttaactccacatgtcccaaggccttaccaaactgtaaagcagacaagccgaacagttttcaaaatccaaagaagcagtttatgaccttagagcatttagcaaacctaatatctgaacataatttagaccacatgtttacattttgaagacatttgtattttaccaataatctttaaaactgtttttatttctcaaagattaaagtcatgtgaactaaatggcattacagcttttatttttcctttaaaatttttgatctaagcctttattttctttaagccaattaattagagctcctttttatacagacagacagaagaagatccagtagttgtaagatttttcatctgccagtttcttaatttgattactggcctcagggtggagcccttcaagagcagggctaggaaagcatgcagtttctagggctaataaacaggcatagcaggaagacaaatacagattttgagagggttctatccacttttaattcctggtgttccatgaggaaaacacaggtttttgcccaaaatggggtccatggcaccttttctgtttttcccaagccatcccaggctatcagaagttgtcttagggcctctcatgtgtgcattaagggtggcaagacaggctcggtggctcacgcctgtaatcccagcacttttggaggctgaggtgggcagatcacaaggtcaggagatcgagaccatcctggctaacacggtgaaaccccatctctactaaaaatacaaaaaattagtcaggcatggtgatgggcgcctgtagtcccagctactcgggaggctgaggcagtagaatggcgtgaatccagaaggcagagcttgcagtgagccaagattgcgccactgcactccagcctgggcaacagagcaagactgtgtctcaagaaaaaaacaaacaacaacaacaacaaaagagtggcaagacaaaatggagaaaaataattcaggtgactgagaagaaagaaaactttttccagcaaaacaagatccaagaagagaaaaaaaaaaagcataaaggcctttcaaatgtacatatagcttggatatccacttttaattaaggtgacttttagctgtagcactctttaaaaaattcttttaattcccttattacccaactttagccatgccaagcagctgatatttctgacttttgaactttaccaaaattaacctcacaggtgaaaccaacaaacctcaactaaggttgatttaatcatgagtgtacaaggcattttcagaggtggtaggcactttttacaaaatctaaaatctttaaaggtagctcagagaaaatgttatgggatcattgaggtgccgcttttctggccagaaacctctgtgcagaaacccacagtggggcgggcagctccaggtgtctgcacaggtgctggctgtctgcaaggctatggctggaccaggcacaccacaagcaatttccagagatggcactggggaacatggtggcacccagaagcttgaacatgccagaaatcacagggccccaaggagggagtcacagtcctggctgagggagctccctggtcttggctccctgaaaggttgcagctcttttctccatctcttcacctgtaatgtggcaagcaaagggcatgtctcaaccctgtttgtgttacagctcttttagcctcgccatttggcaggtcccaagtcttgtcctgtgaccaggaagaataggtatgctgacaagtggagggcgagcaagaagaagaggagctttattgagtaatagaacagctgagaggagaccctcagtttgtagctcctttccacagtcagggtgtcctgatgaatgttcagctcctagcagagagggtagctcctctctacagctggtcatcctgtcatctgctctgctctggttgagcatggggcttttatgggcctcagtggggagaaagtgtatatcaattggtccatgggtggccatggggggcacctggaaaaggcaccacaaattcccactttggtctgcagttctggcagcctcgcccccagccatcaggccctccctggcctgaggtggggcctcaccagggacccacctccttctgcccaggagcctgtctgcccccctgccactgtccatggtgcccaggctacttgtgacaagtagcacctgcagaccagtgccgagctaccctcagtgcccctctcagcttccccaccatgcttgtcagtgcccaatgtctagaggaggctgaggcagcagggggctggtgtgtctggtgtgccagtactgccccaagtgtgcgcgtacctggctgggctgtgacagtgcccatgctggactccaaccccgctccaagatcagagcaggtgctgggagctgggagaggccaggcagcaggagcagacacccctgagggtgcagagtgcagagacacccaggtcctgcacctgggagggcaggactcctgccctctctgaggagcatgcaagaagccctggctgtgcttcctcgcagcttggggtgggggctccaggtcctcactgggcccctctgtccccacccctctgtgcccaaccatgcttttcccctccattgggcagcttgatctagccccttcatggcagcctccaggacagcaggcttttggggggttcccacttgtccctggctcctgctggctccatggagagtggcactgccctgggcccaactctaccttctccttgagccctcccctgcagtggtggcagatgagagcagcaactcggagccagggtctggagttacgaaggctaaggccctgggggcaggtcccacctggctgctgtgccagggtgggggctgcacagtcagctgcctcagggacatggggcacagggggcccaccgccaccattgctgttcccacagctgctcctgtcaccacctctcacacctccccactgcagtcagtgcagtggttgctctggacagcccactgctgccatcaaaaggaagctagaagttgttcatggaggggaggagaatcagcaaatggtaaaagtcatgcagatattaaccagaaagtactcattgcctaagccaggactgaacccgggactccattgcaaaatggcaaagaccaaaagaaagtactgccatgtggttacaaggtccagctgcaaaggacgtaaaacaagatggagacctcatccagttcttttctttagagacctgtagcaaagtttgttactaaacagtttgccaggctggcttgaacagtgggcttacggggtcctaggcccatgttctatcctaaggcatccctctttctgatggaaagatacagaaagacaaattcttaatacaatggattcactatagcttaagactagtctcacaaatccctttttccattaatcaaaatttacggaggatataaacaatgatttttaccaatcactgaatgaggatatgccgacaattgaagggtgaggatgggtggataagaattttattgagtgatggaacagctctcagtggagagggaacatcgggggtggtcccccacccctgcagtggggtggattccctctcccagtgtggctgagtctgggacttttatgggctcagaataggggagtgtgtgctgattggcttgtgagtatgcaaagaaaggctaaagcaaaagcaccactcaaaggtgggcacagcagtgtagaaagacaattaggaaaggatagatatgtaaaatagatgaagggtggggatcagtcagaggaaagtgtgccaaacaggaagacaggttctcaatccagtctgtggatttgacttgtagcttggctttcaggctttaaactgtcttcagcttggaggtggggtttaaccagggacctgcccctatctgcataggcatttggctgcctcttgccactatcacttgtattaattcagcctcttgtagcctgcagctctcatgccttggaactagggtttgtcctgtaggttctcatcaaagcaatttacaaaatagttcttctgatttctccctttcttttttcttacctaagtaactcaagacattttagggaccaatttcctaatgcttataaaagtctcttgaattatttgaataaagtggtgatataagagaagcatgtcaatccttgcatttcatgtgtcaaaaggcttagctggcctgtggatcatcttcccatactttctttgattttgatgcctttctttgtcactgtatctgaaaagaccaaatccagggacatgcctctcacctctagtcatagtggaggttcactctatattatttttagttttgttgaaattattaaactgacactgtcaaattccacaaaacttgtaaaaatcaaaaagaaaacacatcacaaataatttctctgagttatgacatcatcttcacaaccatcattgacaaggctccacaagggttggccccattgatgaatgtgcctcccctttatggctgggatgtggtgtttttacttaaaccaagaaataaagggatttatgaactttcagaacattggcttctcaaaagtatacaatgctttttctttataaataagattgttttgcttttcaaaattaagtatttttacttgtacagtaaatatgagatttgattaaaagaaaaaaaaaagacaaagcaaactgggagccctgcctacgtattatttttttttttttgagatggagttttgctcttgtcacccaggctggagtgcagtggcacgatctcagctcactgcaactttcgccttctgggttcaagagattctcctgcctcagcctcctgaatagctgggactacaggtgcataccaccatgcctggctaattctttttttttttttttttttgtatttttagtagagacagtgtttcactatgttggccaggctggtctcgaattcctgaccttgcgatctgcctgcctcggcctcccaaagtgctgggattacaggcatgagccactgtccctggcccctccctatgtttttatgattttattattgagtaaactgaggcaccatgtgcaaaacagagcaaatgaagtgggatttttatcctattaaaatgtatttctgaatgatggagataattttcccatatgatggtataggaggctgataagcacagcccagatctgtggctgtggcttggtcttctgcatggtccagatctccctttcctgccttttcttccatgctccggtgatccatcctagttggagttcaacccttgggtttccctggagctttgcttctttgatgcacatgcatgaattcttacatttgcgtattttgacattcttcatttccaacagctgtgggctaaacacttacaggcagggagtggttttgttttgcaagctgctaggatatttgccaagagtttcatgttttcttatcctgtatgcaaagcctgtagaaatgcttttagtttgtcttttgtcttacttctaagtcttgccctctgtttcaggagctgtggctggcgaatctggatgttatgctgggacattattttttcacggggtttaatttctctgtctctttaaaagttgaatggacactgcttccatttccctttgtgatcaatagagtgggctcatatttgtaatttctacactcatcaaattatgtcagtaggacataatttcttgatggccacttaatcctgtaagtgatttgctcaacacctttgattttaattaagtggttcctgagaattgttaaaacagcaagctgtgaatggaaaatagattcaggaatttaaatcacactgaatccctggacatgagctctatgagggtagagaattttgtctgttttgtacactgctgtctcaacaatagctggcacttactaggcattgagtaaatatttacggaataaatgaacgagagaatctaataagaaagaatgacaacagctgatatacttggatgcagaaaaaaagaatggaataactttgaatagtttaatgtcaaagtggatcccttttctcacttctgtgagtttgctaagtgtcttaaattatctgaattacagtttccttatccataaaataaacacttggtaaaccctaaagtctcttcaagccctaaacttttgtggtgtgtgatatacaggtaagggatggtctaatctgtgcacctgctacaaggcagaaccactatggaaaagacagttccaagtggaaacttccccaaaacatttaaggaatggaggcactgaagactaaatgcataatctcaaggaagcactactgaaggatcctattagtttagacacatagctttccttctccctccctttgttgctccttctcttccttcctcccttccttcctttcaccagtctcattaccacatcagatgattaattgatgggtcctatgaatgaaatgaatttgaaagctagtcaaacaaaaaagacatgagacatttactagttaaagcacgtgctttctaatctggggaaacttgaatatatggcctcagtggtgtagctagaattttgttagtcaatatcatcttagttataattaccaaagtaatgctctacaaaataaattttaagacattttgctgattataatcacatttcctgagtagttagacatgttctggaatgaatttattttgtctatttcaaaatggcttaaagtgctagaatttctgttgcttccccagattactctatactttcgtgattctcacctttaacggttttctggttgcttgggtatttttaagtcattatatttttctcactagttgtctcttaatttacttaaaggaaggtatttgagccgtaactctcttgaccccatgccgatttcttgacagcctcttaatcctgtaagtgaacaatccaccaaattgcctagtggattttctaaaagttatattcccaattctagcataatagcttggttagtgttattgcactgaaagatagaggagattgtgaaggctcatgcacataatataaacagatacatctttgagaagaggaagagaatgagggaggagagagctccgtggctctccatcaaacaagggtaaaagtatcttgttggcccagaacatattttaccttaaaatttaaggataatttaatttttaaatgccagtttcatttcatcatttactcttgttttatggaaattaaaaatagccagatgcgggggtcacacttgtaagccgggtgcggtggctcacgcctgtaattccagcaatttgggaggctgaggagggtggatcacctgaggtcaggaggtcaagaccagtctggccaacatggcgaagccctgtctctactaaaaatacaaaaattagctgggcttggtggcagatgcctgtaattccagctactcgggaggctgaggcaggagaattactgggattcaggaggcagaggctacagtgagctgagatcacaccattgcactctagcctgggcaacagagcaagactccatctcaaaaaaaaaaaaaattggccgggtgcagtggctcacacctgtaatcccagcactttgggaggctgaggcgggaggatcacgaggtcaggagatagagaccatcctggctaacacagtgaaaacacatctgtactaaaaatacaaaaattagcagggcacagtgatgcacgcctgtagtcccagctacgcgggaggctgaggcaggagaatcacttgaatctgggaggcggatattgcaatgaactgagatcgtggatattgcagtgagccaagatcacgccactgcacttcagcctagtgacagagcaagattctgtctcaaaacaaataataaataaataaataaataaataaaataatacaacaaaataaaaataaaaaagtgaaaaaggaataaagaaataggaagaaaggtatagaaagaagaaggaagcatagaaacaagctagctattgttacagccgtgtttcttgagtgttggagtagggaatgataccgtgatgaaagctttctgatgcatggcgactcctgggagcctcacagtcccttccttccttccactgttctcccagtttcacctcccttccttccctccaatattttcttttcctttcaactttgcttctcccattctccaatttccctgctatttgctacaatgtgcctgttgctcaggatacagtggtgacaatatggacaggagggcacacacctgcagctgatcctcttcttggggaagacagagacaaagcacgtaatcacacaaaccagtgaaatgataaattctgataaatgctgtgacaaagatgacaaggagagagtctaacagggggactaatttagactgatggtcagcaaagacctctctgaagaaataaaatattaaaatgagactcgaaggattagtagaagttatccagaaccaaggggtgcgtgtgcacgtctgcgtgcgtatgtgtgtgcgtgtgtgagtgtgtgtgtatgcatgtgtgtgtgtatgtgagtgtgttggagagggtggagaagcacatgcaaaggctctgagacagaagaggcagaaagtgttaaaggagcagagagaaggccagtaggaggtgggcagggctggaaatgacagggggaggaggctgtggatataatcactttgatataatctagaacatccattggaatccactgaagggcattgggtagcaggttaacgagatttaagtcttaaggaggttgtaatggttttaagaagacttttctgaccaccctatagaatgtgggttgcagttatttgaactaaggaatgccgcaatgcacctcaccaaagcatagctgccgagtataatggtaggagccgactgttcaggttcgaatcccagccctaggtgttattagctgtatgaccttggacaagtaaatgaaacgttttgtggcctatttctttgtttgtaaagggagaatgaaagtagtatcacccaagggctcttgtgaggattcactgagcacaataccatgagtaagtgctcaagaaacagtagacattgtttttacctattcctgaatgttgctcttgtaagacacaggtttgtaaaaaggtaaaactcaataaaactttgtaaatggaaaaacatttaaaatgttttctgggaaaagtagcccttagaaaatcctttaataaagccagcaagcaaacaaaaaaccaaaacaccattacctttcttcttggaaaataccgtttcctatgtgaagttgcttagcacaggggacagttgtcacgctgcctgctgagcctctgggcacagtgaaccagccccatcttcctacttgaattcaatccggcaaatttcagatgatcttctacctgcaaaatactgttatgagttaaactggttttggcttcaagaaacagaaaattcctactcaatcagctggagtgttgagggcactttatatttcacatggcaggagatctaaagcaagggtggcctggtttctggctctgcctctctgggtcctttgactctgtctttttctgatactagcttaatcctcaggctggtgccagcatggacgagtggagaaggagacttactaagcaaaattaggactctgtcaagaaggaggagagaagatggcccgagggaaggcagccgacagcatcacctgcagctctgcaggacatcaaccactgccctcaaaacctcacgccgtagggagggacgtggagacagtcacaaggaatctgatcatcaactagaatgtcacacttagcagatcagagtttctttgtaaaacgctttttatttgagacagaatcttgctttgttacccaggctggagggcagtggtgccatcttggctcactgcaacctccgcctccaggttcaagccattcttgtgcctcagcctcccaagtgggaccactggcatgtaccaccacacccaattaatttttcaattatttgtagagacagggtctccctatgttgtccaggctggtcttgaactcctggcctcaagtgatccactgcctcagcctcccaaagtgctgggattacaggtgtgagccaccacacccatcctggaatggagtttccatcaaaagatgtgagactatgaagaaagatggattaattatttcctgactggtgccagagctggcgatatctgattagctccttgaagaatcaagaagaattggctaaaatatagctttctttacagaaaaaaaatattttttacaatgtccctaaaaccaatttttaaaaaattttattttatatatgttggggaaaatgatggtaaaatacaagaacataacataaaatttaccatcctaaccatttttaaatgtaccattcagtagtgccaagtatatttacattgttgtgtaacccatttccagaactttttcatcctgaaagagtgaaactctatatgcattaaacaaccctccatttcccctctacccaacccctggctatcaccattcttctttctgtctctacgaacttgattactctagggatctcatataagtggatccatacagtgtttatccttctgtgactgtctaatttcactcaacataatatttctaagtcccatccatgtcacagcatgtcccagaatttccttcctttttccagctgaataatatttcattgtatggatgtctacatcacattttgtttatctacccacccgtcaatggataataacttccacttcttggctattgaagtgggttgcttccacttcctggctattgtgaataatgctgctatgaacatgcatgttgcataaacatctcttcaagactctgagttcagttcttttggattaatactcagaagggaaattgtcaagcttgatttttaaatctcttagtggaaaagtgtgttttattgtaaaaataatagttgaaggtagaggtatgatatgtattttattttattttactttttcttgtttccagtggagttggttgatatacattttagagctggactgctcaatgtggtacccaggctagcagccacaatagcagcacctgagagatggtttgacccacagcagctcagtcagtagggtactcactaaaccagtgtgtatgagtcataggatccccaggtgattcacgtgcatgctcagggttgagaagctccgctctagcattcacattgctttccttccaggagtttaccatcacgagtatctcgccctctttagttttaccttcattaaaaaattttgtcttctctccttttttagctacatacaaatcattccttttcaatgactgtgttagaagtcaatatttaacactgcagctgcagagatcatttttttctttctttttcctattaactgtttcatctgcttctaaaagagtcaggaattagaaaagaaggcccacgttgaggtgactgctaattaagtcccatcttgaagatgattagtttaatacagcaacaaaacaaacaagcaaaaagagcatattttagttttggttgagaagggtaggacagaggaaaacagaagtatgtgaaaagaattgctaagtgactgataaataggcttaagttatttaaactggcactgagcgcaacttaaacagtatgttttgcatcatctaaatttctaaatacctggagtatatttgtaaacatggcaatctaacatgttattgaacagcacattcatattcaaattagcataaacgaggatttaacagctgattgcacagcgtgaatgatagtaactaattgtcaagttggaaagttgcacagataatagtactaatgcgatcagcacacagcaatatgacttacagtagcaaattcacaaattttcagcttgctgcccaagtcctgtacataaaagaagattctgaattaaggcaatgtggccaaaatgggcagtcagaagggaaaagaagagagagaaggaagaatcgagctaggtttgaggggcggtgtgaaacttttctttcctccatgcaagccttcacctcttttataacagtcatcaatggggctccctggccattcagtgctgtccctcttataggaagcaattgttcagaggtgtggctcatttcaggcattaatctctgatgaatggcggctgtgcctggagcctgcaggcagctggtcagtggaatgtaacaatgaccacaggaggagaatgggcaaatgcttcactgcagatgctgcatccccaacattgaccttggtcatttccctcccagggtggcgtggcccctcgcagcaggagcctggctttctgaacaactgccattgtgggcaaggtggcagctacctgcgggatttgtcccctcctaataacatttagacccaacaggtggtcacaatgaggggtggaaattgaggcaaacgtggacaagactgcagaaggcaaaacacaaaaacaaaacccctaattttcagggaggaactttgttgcagagattagcgactacatgctcagcaggtctggtcggaggatctgaagtccgggtgttgagcagccatcaggggaagtggctgttctttcagcccagggcttgcctccggcatgtcctccatccactggtcaccagcctgcaatgttagccaggagtactagggacactttgccccaaggtatttgcagaacagtgggaggaggagaaatgtgacaaataatttgggtctctgcccactcctagtgccttctatgcctttaaatccctctacaccccaccaggaaatatatgtccctatccttatcccttctccccatcccgatctccatccccatccccatctccacctctctgtaccttcacctctacctccatcagtctatcatacctatctattatctatctatccatctatcatacctgtctctatgatctctatcattgctatctctatcatatctatctctataatctctatcattgctctatctatctatctatctatctatctatctatctatctatccatctatctgatatagttgggctgtgtgtccccctcccaaatctcatctcaaattgtaatccccataatccccacgtgtcaagggaggacctggtgggaggtgattggatcttgagggcagtttcccccatgctgttctcatgacagtgagtgagttctcacgagagtgaatggtttcataagtgtttggcagttcctcctgatctctctctttcctgcctccttgtgaagaaggttgcctgcttctccttctccttccgccatgattgtaagtttcctgaagactccccagctatgcagaactgtgagtcaattaaatctctttcctttataaattatccagttttaggtatttctttgtagcagtgtggaaatggaatgatacactatatatcaatctctatcatctatctctatttatcatgcttatctgtctacctatctaccatatctatgatatctatcattatctaactatctgtagctactatctattgatctatttatctatatctactatctatctatcatttctgtatctctgccatctctacctatctgtctatcatctatctgtttctattatctactatctacctatctaacacagaaacatagatttggtcatgtactacttattacttctatgcctttaatgactctaaccattattgactctgcattgacaacaaaaagtctgaacttttaacaaggattgaaagtctttcacaatctgtcttcaccttggctttttagcatcttctttccctctccactccccacaacaggtgacagatactgtgctaggtacagtatgtcctgtacttcctccctctccactaaccaccctcatcacccctctcactgcctccaatttccttccccccagggcctggtctcagagccacactaggccatgggactcttgtgtccctgccccaactctgctcttccccctctggccgccatccttgcggtctcctctcgagacttcttttctctgtgaacccctgtctcgctgcactaatggcttcttcttcagagctcccgcctgtcgagagccaaacatggctgcctgtctgctggtctgaggattcctttctcactgtaccccagggcccaggagcatttccagtagaataatgtgtgtgtggggggcaggggtaggtggggggatgagtgtagattgccttgcctgcctgcagggaagccaaggcctcaggctgtagagccaggcagctgctggtcctagctgcaccacttaccagctgtgtcctctggggccagtgtcctcatctctctgaacctctttcgtcaactgtacagtggagctcataacagcgccttcctcacaaggttgctctgaggagtgaaggaatgaatgcaggtgcagggcttagaagagagcttagcacaccgtaggtgctcagttggcagaatgtatgtgaactccctgagggcaggtaccttgattgactcactcataggctctcagctcctaagaccaggcctggcatgacaaagaattgagtgacagtgatgaccaagtgtgaggattggagttggcagattccacagggatttcatccatgtggggctgaaacaagcctcaggtgaccagcaagcctctctctcctctgcatttggaaatactgtgcctgggtcattactcttttgttactgttgctccaactcatcgggaaccacataccctgccatattgtcattcctggccagacctggggaccagcactatccagcctcactgcacgatttgaaactgtcttcaagagcatcctctaccagctttccacactgaaggtgattccattttctctgctgctgcacagttggcaagtcacctggtcgtgaggtcttgacctatcccatgtttggcttggtgcgtcctcctgcatggctttgccgtaccctgttgcatgcagggaacttgcagcacttttgtttccctcacttttatatatgttagcttcccctgacctagccaagcttcttttggatgcaagtgcccaaaacaaactcaagaaactgtgagaaagacaaatggggtgtgagtggtaagtaagggtggtttttccaaggaatcagggattgctctcgggaaaggctggagacaggcacagaggctaccgtctccaccccacagagcctggaaccagtgtgccagagggtggatgtggggcaatggcttcagatacaggttgtctgggagcaggttccaccccagggcaggccagaggagaggttttggccttggacagtccttgctctggtgagcagtttggagagagttcatttcctgaggtaggttactttggggctgagtgagatgggacctttatccaattttccaggcattcctgggggacatgtcaggaaaagagcttctcagggaatgactcttagggcctggtatgactgggattctctgatgtgggagatgggaccccacttcagcacaggaagaaggtctgtgctaagtctacccttgcacatagtgaatcattggcttaactcagagaccaaaagatacaggtgggctggaattggagtgggaattggggatggtgtcaggagacaatttatgaggatttttgagagattctggggattcatcatctatttctcaaaatcaagtcacatatttcgtagacaattttcattcccaagttataaaaggatgattcttaatcccaggataaaatttgtcattttaggatttgtgcattgctaaagacaagcattgttacaaggaacaaacagccaggtttctcagtattactcagttacagagaaagtaggatctggttttggtctgactttgctaattcaaatagaatttgtttttgttatggcttttagatgatccctatttcacagaaaatgtctacagtctatacatttttatttgtgccatggcaaattcaattcagttttactttttaaaatttttcacaaggaagagtaaaaatgagaggttaaaaaaaatctgtatttcatgaaaggcttgtatgacgacaacgaagctattgaatttgggatgtgaagaccctcttttcaacacaatgagaacagtttgttgttcagattagactagttcctgaaatttaccaaaaccccaaacaaaatattagcaaatacaatacagcaatatataaaaagaagaatttatcttgacgaagtgtggtttttacaaggtacagaaaattggttgaacattcaataaacaattatatcataaagaagcaaaacgttgtaccatctcagtaaatccaaaggaatccctcagtgaaattcaacatccatccaagattttaaaaagcaaacaatcactcctgaaatcccagcactttgggaggctgaggcgggcagatcacaaggtcaggagattgagaccatcctggctaacacggtgaaagccaatctctactaaaaatacaaaaaaaaaattagccgggcatgtggcgggtgcctgtagtcccagctacttgggaggctgaggcaggagaatggcgtgaacccaggaggcggagcttgcagtgagccaagatcgtgccactgcactccagcctgggtgacagagcaagactccatctcaaaaaaaaaaaaaaaaaaaaaaaggcaaacaaaaagccaaccaaaacaacaacaaaaagctctcagcaaactgtaaactagaaatagaagaaaatttcctctctaataagggctatctaccaaacacagaactaaaataatatttaatgtttaaatattaaatgcttttcccctatagcgagggcaagaatgtccacgctcatcacttctattcaacaatgtagtagagggcaaagccagtgcaataaggcaagaacaagaaattaaaggcctaaaaatctgaaaggaaggagtaaaactatctttgttcacaaatgacatcattgtgtacatgaaatgtccaaaggaatctacaaacaagctactagaattttaaaaataaattcagcaaggttataaaataaaaggtcaatgtacaaatattgaaatatatttctatatacaggcaacaaacaatgagagaataaaattaaaatatactacttaaagtagtataagaatcatatattcagaatacacttaaatttagtgaaagatatgcaagatcactacatgagaatttataaaatattgctgaaaaagttaaagaagttttcaataaatggacagatatgccatgttcatgtattggacaacttagcatgttaagatatcagctttcctcacatttatctacagattcaatttaatcccaatccaactgtagaaatggacatgctgattctagaatatatctgcaaaggatctaaaatagccgaaacagctgcagaaaagaagagcaaagttggacgagttatactagctgatttgaagagttattgtattagtccattttcacactgctaataaagacatacccaagactgagaagaaaaagaggtttaattagacttacagttacacatggctggggaggcctcagaatcatgacggaaggcaaaaggcacttctttcatgttggcagcgagagaaaatgaggaaaaagcaaaagcgaaaacctctgataaacccatccaatcccttgagacttattcactatcacaagaatagcatgggaaagaccggcccccatgattcaattacccgcccccccccgggtccctcccacaacatatgggaattctgggagatagaattcaagttgagatttggctggggacacagtcaaaccatatcattccgcccctggcccttccaaatcttatgtcctcacatttcaaaaccaatcatgccttcccaacagttccccaaagtcttaactcatttcagcattaacccaaaagtccacagtccaaagtctcatctgagacaaggcaagtcccttctgcttatgagcctgtaaaatcaaaaacaagttagttacttcctagatacaatgagggtacaggtattgggtaaatacagctgttccaattggaagaaattggccaaaacgaaggggttacagggcccatgcaagtccaaaatccagtggggcagtcaattttaaagctccaaaatgatctcctttgactctcggtctcacatccaggtcaaattgatgcaagaggtgggttcccatggtcttgggcagatctacccctgtggctttgcaggatatagcctccctcccagctgcttttatgggctggcattgtttgtggcttttccacgtgcacggtgcaagctgttggtggatctactattctggggtctggagtatggcggccctcttctcacagcttcactaggcagtgccccagtagggactctgtgtggaagctctgacctgatatttcccttctgcactgccctagcagagattctccatgaatgccctgcccctgcagcaaacttctgcctgggcatccaggcatttccatgcatcctctgaaatctaggcggaggctctcaaacctcaattcttgacttctgtgtacctgcaggctcaataccacatggaagctgccaaggcttgggacttccaccctctgaagccacagcccatgctgttacattggcccctttcagccgcggctggagtggctgagacacagggcaccaagtccacagcatggggatcctgtgctgggcaacgaaaccactttttcttcctgggtctccgggtctgtgatgacctggtgatgtgatgttccgtgttgccatgaaggtctctgacatggcctggaaacattttccccatggtcttggggattaacattaggctccttgctactagtgcaaatttctgcagccagcttgaatttctccccagaaaatgggtttttcatttctgttgcatagtcaggctgcaaattttcccaacttttatgctctgcttctcttataaaactgaatgcccttaacagcatccaaatcactcttgaatgctttgctgcttagacatttcttctgtcagataccctaaatcatctctctgaagttcaaagttccacaaatctctagggcaggggcaaaatgctaccagtttctttgcttaaacataacaagagtcacctttgctccagttcccaacaaatttctcatctccatttgagaccacctcagcctggattttattgtccatattgctatcagcattttgggcaaagcccttcaacaagtctctaggaagttccaaactttcccacattttcctgtcttcttctgagccctccaaactgttccaatctctccctgttacccaggtccaaactcacttccacatttttgggtatcttttcagcaatgccccactctacttgtaccaatttactgtattagtccatttccacactgcttataaagacatacccaagactgagaagaaaaagagatttaattggacttacagttccacatggctggggaggcctcagaatcatggaggaaggcaaaaggcacttcttacatggcggcagcaagagaaaattaggaagaagcaaaagcgaaaacctctgataaacccatcagatctcatgagacttattcactatcatgaaaatagcataggaaagactggcccccatgattcaattacctcccctgggtccctcccacaacacatggaattctgggagataaaattcaagccaagatttgggtgaggacacagccaaaccatatcacttattaaaaagctatagtaatcaagacagtgtggtattggtatgttgaccaataaagttataatattttatacatttaaaatggagagctttattcctgaaaggtatcacaacctgcaggcaggaagcagagactctggcagatgctggaaaaacagcacttcaagggaggagtaaaaggaacaggaatttatactgagtggggtggctgcatatacatatttaataagctgcatagggagtgctgaatatttatgaaaggagaaacacgcacatgtgcaattgagttgtacacctctccttgtatcacatgtacaaaaagaatggcaccattagcatgatctgagggtcaagttttcagccccgtggcatcaaaaggtgaagcagaggacacaaacgctgtcattgcattgtgcatcctctgtagacgtcccagaaccaccatggttggtggcttctcatcaggaaaggatgtgttgcaaaactggtgactgtcaatgtaaaagcgacaaagggggtgtggggtgggggtagtggtgtcgggggagtctggctgcagcctcagatgattggccaaaggtgataaaggaatgagatgtccatttcttgtttttcacagcctgtttctgcttactccttaggaaagaattctggttaaaggttaataaggaaggggtatgttgaggcataactagttcccattctgccctagccagcaactcaatgaactttttcttagcttttaggatttcttaagccaagggggtccatttaatccattagtgggtcaggattacttttcaagtataaggataaaaaataggccgggagcggtggctcatgcctgtaatcccagcactttgggaggccaaaggtcaagagatcaagaccatcctggccaacatgatgaaactgtgtctctactaaaaatacaaaaattagctgggcatggtggctcatgcctgtagtcccagctactcgagaggctgagggaggagaatctcttgaacccggaagacggaggttgcagtgagctgagattgcgccattgcactccagcctggtgacagagcgagactccatctcaaaaaaaaccacaaaaaacaaaaaacataaagaaaaacagtgagtctggaaatagacctgcagtggtttactggacaacatacagacccatgatcaattgatttttgacaaaaatgccaaagcaatttaatgtgagaaagaaaataaatcacatgtcagtaaatggtagggaaaaatggtagaaaaatgagatattggcatagaaaaaaattaaccttgggtcctacatcataccacacatataaattaatttgaaattaaaaattaaagacaggctgggcaccgtggctcacatctgtaaccccatcactttgggaggctgaggtgggtggatcacttgaggtcaggagtttgagaccaggctggccaacatggtgaaaccctgtctctactaaaaatacaaaaattagttggacatagtggtgggtgtctgtaattccagctactcaggaggctgaggcaggagaatcattggaacccaagaggtagaggttgcagtgagctgagatcgcaccactgcactccagcctgggcaacacagcgagacacaatctaaataaaataaaataaaataaaataaaataaaataaaataaaataaaataaataaaataaaataaaataaaatggagaatatcttcactattggagacaggtaaaaatgtcttagaaagtaaaaaaaaaaggtattaacaataaaaacaaactattcacatattcacatattggacctcatctcaattagacacttttcatcaaaagaaacatcattaagaaactgaaaagttaagctacagactgggagaaaatattcaacacacacacacacacacacagacacacatacacacacagacttcacctagaatatatttgaaaatttccatatattagtaataaaaaaacaaacaattcattaaaaatggacaagaaatttgagtaaccactttgcaaaggaagatacttgagttggtaagaaacatgaaaagatgttcaacatcattcagcaagaggtaaatggaaattaaaaccacagtaagatactgcaacacactcaccagaatgtctaaaattaaagaaagactgataataccaagtgttggcataataggtttttttgcccagtgcgtagcaagtctatatactgagacactgcagccgagagttcaataattgcagggcagccaaatgaggagacaagaggaaatctcaaatctgcctccttgaggaatttggagctagggattttaagaggtttggagtagtctgaggtgtgggggctgttgattggttgaagaaagcagggtgaaatcacgggactgagagatgaagaaacagtgttcccatgctaattcacttcctctttgtgggtctgcacgctggttggcatcagctattttgctggaaatcaggatctgagaaacatcttaagcaaattttagacaaaagccatatgattctaaggtcagaaattccatctgtgggaagggtataggatgggcaagtggttgtatctagtgctacatgacttttggttagcaagcagctataaggaagtggaccaatgtgcagccttattaatgcttaattatgactatatttctgtccagaacttggcatgcaatttttgtgagcctagcatgcaattcttgtgagggtagtttcagtggcaactgtaccatgttggcaggagtataaattagtgtaatcttagttaaatgtgtgcccatgttatcacccagaaaatctactcctaggtatgttgcaaagaaaaatgcccataaaaagatgtgtccaagaatgtccatggtagctttattcttaataaccccacactgaaaacacaagagaactgataagcaaactggcatatttttacaatggattactgctcaccaatcaaaagcaacatactactaatacaagcaacatcatgaattaatttgaaaaacattatattgaatgcaagaagcatagtttctttctgtgtcttcacatcaccttctctctgtgcatgtttgtctctgtgtccaaattttcctttgttataaggacaccagtcatataaggttagggcccacactaatgagcccattttaacttgatgaggtctataaagaccctattcaaaaataagatcacattctgaggtcccaggggttaagattccagtgtgttttttggtggggtgggcggcacatagttcaaccaaatggcacagttacattttaacacagcctcctggataggcgccgatgtccactgcatctctggtaggagaatctggggtgtctaaatgtggggatagtccatcctcccctcctgcccctcccaggcctaagatgcgtggtgcatggacagctctcctgggaagctgtttcctctgtgtatcacagagcaaagccagacctcaaaacttcattgaaattaagcaatacatactcccctatctctacagaaacctcatgaaaatggtgctgaataattggttttaaacaagtatcgtcttgaagcaggtctagtatgtctagagagaaggctgtgaacctgaaaccagtgggcagtgacttttttttcaactaaagaaaaagctggtgataaatattaacaatataaaaaatgttccagaaaccaggccagcaaaacctaagcaggaatgtcatggacggcttcttataaatgcttcgtgttgttgttaatcccagttttaatttctagccttattaaagacttaaggctttatctccgtttctttcccctggaaaaccagatgcacataatgatctttatttctgtcattttctcagtggtcacagggtctatgctgcttaatcttttttatttccacgtggattaatgagggctgtgtggctctgtctttgtcccctgatgagtcccagggacaagcatctgtgggattcaacattgcttctcagagcaagattttcaccgtgtagataaatgccgcagtggaggggggtaagtactgggtgccagctttgctgaaacaggcagaacagaatccatcataacctgttaaatggcctccccctagcccccaataattgcatttatgtctcagccagagaacttgtctggaaggcttttgcaagtacaacgccccacagacggcagggagagaagagcgatcagagaaacagagtcttagaatcaaaaatgaccttaaatcatttaatccagcctgccttaaacaaaacaaaacaaaacagaacaaagcaaaacaccagagaggctgtgtgttttctaaaggatacaccacagcaatacataacaccatgaattaatggaagagaagatctggtctcaacaatgccccattgactgtagcctaaggacctaatagcaccaagggtgaatatttgtttgtcacctgctttaaaaacatgtgcaaagttaggggattaagacttcagatacctgccacgggtgtgttcttatgctgtgaagggcttcacaaccttgatgaacgtattcttggtgggaggggtgcttaacatcagtattatttttcttccccagcaaaaaaaaatccatttgaggatgttccaaagagtataaataatatgtgacttttttttttacaccaaacttggagcatttgaacagagaagtagtaaaagaattacttttaaaatacatcgttagtaaggaataaaggtatattcatgattttggaatgaaaagaaatatgaatattttaagagctttgttctggttattcatgatgtattggccacagttacaagtattcagaatttagatgactcccctacctttcttgttccactgagctaatgggggttgggggtttgccatggtccagtaggaactatggagtttctaggagaaaaggggtgttctcccgtgtaaagagtcaaggatatctaattcctgtaaggtcaaaaaggacagtggcgatatggaaattggaattttataaataggaaaagagggtaacattgaaatatgaattaggacatagaattgcaaatggatatttaacaaataggaaaaatgtttggtccaacaagggcaacttagaggtcgggccagattcggagtaagaagatgaatgttgggagtaaaaggagaggcaaaaataagtggttgggtcctgactgtagagaggcacagtaacagcggcactggaggcttatgaagacttgtgtgatgtgcagtttgaaggtgtgtgacatctttggcctctcaaagctccatttttggttgacagttgcacatgactggagcccagtagtcaagaacttgagcttcagcttcagataaacctggctcaagtcgcactccacttttggttacacgtgtggctttggacaagtcacttaacttttctaaggctcagtttctcagctgtaacatggggctgatcacatgcaccctatagagttgtaagatttcatgggatggtagatatgaagcactttgcactgtgtctggcacttagtaattgctcagaaattgatggcaattattactaattattactaataagaacaaatgttctttcaaattgcttcaaagaaaatgcagtaattttcacatcattgacgtttttcaaagattatcattgtgttaccaaaaaggggtcccaatccagaccccaagagagggttcctggatcttgcacaaaacagaatttgagacaaatcgatagagtaaagtgaaagcaagtttattaagaaagtaaaggaataaagaatggctactctataagcagagcagtcccgagggctcctggttggccatttttatggttatttcttgattatacgctgaacgaggggtggattattcatgagttttccagaaaatgggtgggcaattcctggaactgagggttcctccccttcttagaccatatagggtaactttctgatgttgccatggcatttgtaaactgtcatggcaccggagggagtgtcttttagcatgctaatgtactataattagcgtataatgagcacggaggaaaaccagaggtcactttcgtcgctatcttggttttggtggcttttgtctgacttatttaccacaatctgttttatcagcaaggtctttgtgacctgcctcttgtgctgacctcctatgtcatcctgtgacttagaatgcctgacctcctgggaatgcagcccagaaggtctcagcctcattttacccagcccctattcaagatggatccaatctgtttcaaacacctctgacaattgcagattttactggttggctatttgcctgccttggggttcttagcagcaaacagaagaacccaccccagctaacctcgggagcaaggctacccatcaaatggttccttaggtaattcagagcctttaggaggcctggaagacaggccttgtagccagaaacccaatcatacagccaaacacagacctaccactggcccactgggcacagacttggtgcttattatggcagacactgaactccaggacttttgtcactgctgcccccaaaaccagatgcctccacaaccaccatctttgccagagagtgggttctctgcagtacctgtttcctccaaacaagattattacacgggtgcacccatgagcccagccccagccacgtacctgttccatagccaacaaggaggctgggaattgaggatctggcctctactttaggaagaaagaaacccccaagccataataagagaggtgttcaaaaggagccaggaagctagaaaacatgacaaacacccacacactgctaggaattgagggccacacttcaaatccagttccttctcattatgttctgttggcaagtttatgcttcttattcctatgacgatggaaactgacttcctcactttgaaaaagaaaaaaataatttaaaaaatcaacaacattgcaatactgagagctcaggagcccatcaaaggtgaacatgggttggacacagtggttcatgcctttgggtggccaaggcaggaggatcacttgaggccaggggtttgagaccagtctgggcaacaaagcaagattccatctctaaagaattctttcaaaaaacaatgaatgactgggggacagaatgagctgctgatgctgacactctctttaccatcgtaatattccatcattaaactcagactggccacatttagtgcatttatatgcacctgccacgtgcaagtcagagtttacagcgggcactatccctttcaaacaggtcaacttgagatgtttttaatatgcttatttcaatgagctgccaataaattcacttaaagctgatgggtatcattacttctgatgtctcttcagaatcagcagcaggttcttttgactgtaatcagttgttgcaaatttattctcagtttcctcatctgcaaaatgaagatagtaatcatttatacttctcagtgttcttgaaagcatcaaatgatgcaaagtgcagtgccgggcatgtagaagaatttaacagaagtcagctatgcatcttgttgagcccagtctggggaataagatagcaatccatttgagctatatcattttgagtctaaactgagacatgactacaatgagacaaattttcttttacagctcataaacgagctctcgaggcagttttgttaggctccaaaaaaggctttcacgaggtcaatgccggtggcataagtacctgctgggcttcccaggacagcagctgacagcacaggcttggcaggtaggaggcgtccttgggcttcactctcatgcatgatgtcaccttccagcgacacatggaagtggatatacccctccctagtgctgcatcctcataaactctctagttactccagagatagagtttctacaacatgcaggatctgttgcacgccgttccatgcattgtcaaaagcgctcccttccactgatctgccagatgatggtgccctgggcagtgacctgaccctttgaacaggtgaaaagatcatctcaggaaatcaatagagatgcttactgctgttgctcatccctgaaaatctttaaggttctccatgttaacatatgtacttttaactcagcccttgttctgaaaaaggagctgcgctttgccaggtaactcgatgccctcttcacccaagggtcaaggctcagagctgacgagctctggcagctctgtcagaggtcgtgcccttcccctgcatgaaggctttcatgaatggcattgcgcacacccctgggaggaaaatgcccccctaagatgctgctcttggcatcccataggggcctgcgccagcttcagatcgaccactctccagagcagatgctgggacaggcagggcagatggtctcgccatgccgtcttagctcccatcaccttgtcacagagggactcgagatcagaggggtccagagttctcttttcctgtcttttcctcttgtgttgcttctttcctaggtagatagatagatggctgatgatagacaggatggatggatgggtggtggatagagaggtagagaaatgccatgaagtgcaaagtaataagtagctgaaattctgtcatttttttctttcccaatactttgtaaacagtaaaaagaatgggtaggccatcagtaaacagctattatgtgtactgtcattatcacgttcaatattgtatgcttgctattattcttctttctctcaccttcgagtaaacattaactgaacatctaatatgtgccaagcaccctggacagccagactcccatccaaccttccacatcacctcaggtcaccatcttgcaggtacccccaggtctgatctcactgaattactcaccaactctccattctcccagaactcaataccctactccctcttcctaaagcagcctttcatttcctgcacctggcaaagattattcaaccctaaggacctctagcaaatgtcacctcctctctgaagcccaccccgataggcttcccttcttttagtacctattgtatcctgattattggttcatatgtgtgattatctgcatacaccataagcttccctttaatcatcttgtactttctttttttatatatatatttttattatactttaagttctagggtacatgtgcacaacatgcaggtttgttacatatgtatacatgtgtcatgttggtgtgctgcacccattaactcttcatttacattaggtatatctcctaatgctatccctccccactcctgccatcccacaacaggccccggtgtgtaatgttccccttcctgtgtccaagtgttctcattgttcaattcccacctatgagtgagaacatgcagtgtttggttttttatccctgcgagagtttgctgagaatgatggtttccagctccatccatgtccctacaaaggacatgaactcatcattttttaatcatcttgtactttctacccacccccagacacccctgagagagtcttcggcacatatgatgtcctctattgatgtttgctgaatagatgaggatgccaaaagagggaggagataccaaaagagggaaagaaggacacccagaagacaaatggtgctcaccttgaggtaggttggagagggtgatcacagccttccttgaaaggaaacaggaaagttgtcaaacttatggagagaccaaaccacccgacagtgcacaaactgcatctgaggctcttggttaggacatcctggagcagagaggagcaggggcaaaagggaaaatccccaagtccgcacagatgcacaagtccacgaccaatgtccttaagctgaaccatgctcattttaatgctaaaaacacacccctgggtggagatttcagatgctaatgagacatgggatgtatgtgctagcgtgtacagcagtagtgcgtgggcatccaggagacctcccacggcatgcttaacaacaatgcccattcccatccttcatgaataatcatgtaagactcctataaagggagctccctcagcgtcagtgggcgctgtcagcctgctctaacccagctatcggagtgtactttcgctttgcaataagctcctttacctactttcactttggactcgctctcaaattcttttgtgccgtgaagtcaagagcctgaacctgcacaccaacaacaacctcacaaatgtgggttgcaccttcctgggtactacacagccataaacacaacttgctccctctcatgcatcttcagtctcttcctctggcacctaatagtcttgacatgggttggtctggttaatctttcagtttttcccctttaccaaaatacctagcagataacttttatagacagggaccccactgtgctgagccctgtgagcccccgacattctcttttcctgcattcggtacagtccaggaatgagggctgcattccatttctactgttaaggatgaagaagatgctcgcagatttggaaactgcctcacagttcaccatcagctttttcgtggcttttgctgttaaagcctctggtccctgggacagcccctggttctagattcccacagtctgcagcatccttgtcttggtcccaattctcttcttgcccatgagactctcagcccttctgcaggcccacagggacatgtggtgtccctgggtgtcttacatacatggagggtttggtatatatgggtttgctcatctgatcaggctgtgaaaccccacacttttccaggaactaacagacagactgaaacaggtggacagccagccagctgtccccaagccatcctccctgtggtgatatctcagaacgagacctttgggtatcatagtgacctctgggctctgactgtgttgagaagctattaaatgtctgctgaaagaacagcaacttccctgtgagaaaagcaggagaatcattaacattttctctccaaaatgggagcaagtgttgggcccagaaatggaaaccagcaagtgatgtaaaaagtttttctatgaaagatgcttatcaaatcctggctcaaaacaaggaagaatgctaaaatttgcaaatgaaatataattagtgtgaccactcttccctgcatgcctcagatacctctttttctgtggtgttgttaattggtcctatacatccttaaaaataacatagaaagttattgagctagcaagtgttctaaatattttattagaacacatcctgggaatttttaaaaatgtgtagatgttttgtctcacccaacagacacacacacacacacacacacacacacacacacacacacctgtgtatggacaaaaacacatcctcttttgcgagttatggaagggagacagtattgcttggtccaccccaaactcccacttatctgtctgggaactgccctccacattcttggggttcccatgggatctgccatgttcttaccttcccagacctgtcagcctcagatgattgctcctgtggttggttcctgacccagctagaccagtgcctccttgtcccaagatgtgcatacctgggacatagatagtcggctcataagtctcaacggccatagctataagatgtgacaacagtgtagacactgttgtctacatgaggtaaatgatggcttacagctagacagaagaaagacacagagacaagaggcagagagaggttcttgatagctttggagaccctggaggcaggtgttcctgaggccaagctctgtcccctcctgcatcttggttgggcaacagttccttagatttgatgagattttctagggtttgctgtctacttttctttatggcctgcagggtaagaatttacattttgaatggttgaaaaaaaaaaacagaagagtaaaatactttgtgacatgtaaaaattatgtgaaattcaaatagagttttattggaacagagtcacactgatttatgtattgctgtggccacttttgtgctacaatggaagaattgagtagttgtgacagagaccctcaaatagctggaaaagcataaaatatttgactctttatagaaatcaaactatctggctttttatagaaacaaagggctgaccctaaagtcagcaacaatgaagggccttttaagaagccatgaaatgaaatcagctctttgaaatgtcactcattgctgcgagatctctggtacttgtatatttgggaagaggttctaactgcaaccattgtcctttaggaaaaaaagaaaaagggaacacatagaagccaactccagcctttaaacacgtaggagatcctcagctatttgtatgtgtaaaatgaaggaagaccaatgcctgctttccctccctctcaatccagtcaagaaactatgtagtcaagacttacatagttccaggaacaggaaactcactctacagccttgtgaagaaactgattccatctttggacacttctttataataaaccccaaatctctctccttagaactcatacctagtgactccatttgcttctcttgaggtcatcaatatcaaatctgccttcctcatgacagcctttcaaatattaacagacactgtcatatgtttcaaatattaaaaaatactgtcatatgtttgttctctcaattcttcatcccagccctttcagctgtgtctcttgtaacgcaggattttattcccctgagcatcccagctcctcttttttgaatacattcctttccttttacatccccgttcagatgcattccttagcactggatgtcacactctggtctacacaaaggagaggaagaccattgctgccccttcttctagatgttgtctgttgacttccattgattgctttcagttgcatgatatttaatttaagaaatcacatggccggcactgtccattggaaaagtgtgatgttaaggtcccaaatagttccaaggagtggactgcagtgtgtgtgcaccttgcttttagagaaaaggcagcctggaatggaattctcccgggtaggtaaagagaacaaaagaccagggctcctccatagcaacttatggggtgaggttcattttatacctgctagagaaggagggaagatgcccctccttcttgagagcagggactcaaaaagatagttgtacacctatgttcacagcagcattattcacaacagccaaaggtggaaacaacccaagggttcattgatggatgaatggatccaacaaaatacggtatgtacatacaacgggatattattcagccttaaataaggactacaattttggcacatgctacagcatgatgaatcttgagggtagaatgctaaatgaaataagtcagacacaaaatgacaaatgctgtatgattcaacttatttgaggaatgtagagtagtcaaattcatagagacagaaggcagaattgtggttaccagggactaggggaagaggaatggggagttagtgttgaacgagtacagagtttcagttctgtgagatgaaaaagttctggagatggatgggggtgatggttgcccaacaatgtcaatgcagttaatgccactgaattgtacatttaaaatggttaaaatggcaaattttacattatgtgtagtttactacaaaaaaaaagttctgccaaagaagaaatcaatattccagtgacacacttgattttcagaaactttggtatcggtggcttttcttttagcagattgaaaaaaaattcataaatttggtgataggctggggggaaacaagacaaacttatgcaaggctggtgagaatgtaaatttgtgcgacccctacagtgggtagtggagcgatagatatgaaagcagaaattcatagatccttttgcccaacaatctcaatcctgggaacagccctgataagagtgaaagattgacaaataacccaactgtccatcaatattagtaaaggactgttgaatcgatcagtacatctccacaatggaagaccatgtggctgtaagtaaagaatgagcagtgttgtatggactgctgtggaataatctctaggatatgttgtaatgtgcaaaaaagcagaggcaagtaccatgtgtacttaactcgcacagtgagttcaccatgtgagtgaactcttgtattaagaaaaaataatgtctatatatttgcttacacataccctgaaatgtacataagaaacttgctggccaggcgcagggctcacaactgtaatccaagcactttgggaggctgaggcaggtgaatcacttgagctcaggagtttgagaccagcctgggcaacatggtgaaactccgtctctaccaaagatacaaaaaattatccaggtgtggtggcacatgcctgtggtcccaggtactcgggaggctgaggtgggaggattgattgagcctgggaggcagatgttgcagtgagctgtgattgtgccactgcactccagcctgggcgacagagcaagaccctgtaaaaaaaaaaatttagccgattgtggtggcggacacctgtggtcccagctactcaggaggctgaggcaggagaatgtcgtgaaccagggaggtggagcttgcagtgagccgagatcgtgccactgccatccagcctgggtgacagagtgagactctgtctcaaaaaaaaaaaaaaacacgaaacttgcttatctatctgtgagcatatgtgtgatgggaggacaagaattgagaagatgggatcaggaagaggagggaggacatatgattatctatctatctatctacacacatgcatatatacatatatatacacacacatacatatgcactatgtgtatgtaactccctgtgaaaatattttctattcaacaaattaaaaaaaaaaaactttagtcagaagtgaaattacatagaatttgggatgccttgccataaatggcctctccatagtacctcatcctggcatcacctaaatgggagggttctaccccaatagctgaaagccctgcctgagccttgggggctctgtgctgtggccagtgctggactatgcagctctggatgcccccgacctgccgttcctctgaccactcatgagaagcccacaggggcagctctgccccctcaccttctacttccattgttcccacttttagagaccagaattttccccaaacaagtcaacatcttgctgtgtttgcagaaaacatcctagcattggagggactaccagatggaaaaatagctccccttttccatttagaagtggcttgtttgatttcaaaatataaaccctgtcctaataataaaaattactttttttctcagagatgtgccaaagtccctcaccatctatccacaggagaatgttccatttttttggatgcctcatagtcacctggtgtgggggacagaccctgtggtggccccacggtccgcacctcctggtattcacacccttgtgtgctgccctccccttgagtgtgggcagaccctgtgacttgcttcatagtagaatgtgacaaagatgatgggctgtcactcctgggcttacgttacatcgtgcgaaacccgacttacaaacagatttgcttttgtgctcttgctggccttgaagaagcaggctgccatgtcgcgaattgtccatgcagaggccacatggcacatgaagtgagaaccataaaagaaaagttgacaaatggtaatgatgcctaggaaagaaagataaagaaaaaggggtgcaggaaaaacaagaggcccagcaccacagagttaaaagcagtgttttgctggctaatgccaaacatggacaaccaagccacagatttttccatagcccgagaagttttgtttttctcaatgaaaaatcagaagactttgcattaaagcatatcagtgatatagatagcctcaaataatcaaaaagaatttacaaagctgtacaactctggtgtcagttagcttggtggaatgacactgttgctctcttttctgtctaatgggcatttccttctaagatattagttctgcctcccacgtattgctgctactggatgcttgacggctgtgagtctcaggcatgggggactgacggttttggtgtgtgtctgggtgagcacaaattacctgaatgctgatgtggtaggcgtctcctggaaagaacactgtctttaattgacttaatgttattttcacctggataaaaatttcaaatttttatactatttgtattttctttccttctttcttctttcttttttctttctctttcctttcttcttttctttctttctttctttctttctttctttctttctttctttctttctttctctctttctttctttcttgctccctgtctctctctctctcccttccttccttcctaacttcctttcttccctccttccttctttcttcctttttctttcttctttctttcctttcttttcctctttctttcttttcttttttctttctcctttctttctttcttttttctttctttctttcttactttctcttccttccttctctcttccttccttttcttccttctttatttctctctgtctctctctttctgtctctctctgtctctctccctctctttctgtctccccctttttttcttccttttctcttttcttcctttcatgggtctcgttctgtcacccaggctggagtgcagtggtgcaatcctcgctcactgcagcctcaaactcctggggctcaaatgatcctctcacctcagcctcctgagtaactggaactacaggtttacgctatcacacctgactaatttttaaattttttgtagagatgggatctcactatgttgcctaggctagtcttgaactcttggcctcaagcaatcctcctgcctcagcctctcaaagtgctgggattacagtcaccctgcctggcccatttttttttctttagggagctaggggtgagtgttttgcattttcgtttcctctcttgtactgtcagcctggcttctgttagcactcctgtgtctggaggaccaggaaatcccagcctagaagactacctagaagctccttcctggccagagaggaggactgagaacaccatagcaaagggctgctgttctgagcatgagcagaaccccccttagacctaacttcctgcttttcctctatgacagcctcgaggtctttaggaaaacggtgactctggagcacagccctggatccctgatggcaggtggatgaatctgctccccacctggatgctgctagtcctttctccaggctccgtgactgaaaatgtgctttacttggcaaaagctgtttctcctcagaactctagaaatcagatcttggcccacctctttcaggtaaggaccttcttaaaattgatgcttgacccaactaaatttgaattacaccctatccctcttggccttgtaaaatcgtatgtatatattttgagacgaagtcttgctctgttgcctaggctggcatacagtggtgtgagctcagctcactgcaacctctaactctgaggttcaagtgattctcctgcctcagcctcccaagtagctgggacttacaggcacacaccatcacgcccagataatttttctatttttagtagagatggggtttcaccgtgtcgcccagactggtctcgaactcctgagctcaagtgatccgcccgcttcagcctcccaaagtgctgggattacaaatgttagccaccacccctggcccatatagaattactgtagagttcaaattctggttcttgcatgtcctggctgtatgaccttgtgcaagttacttaacatctatgtgcctcattttcctcatctgcaaaattacctctccttggtgtcagcatgaggattaaataagaaaatgaagtctaaagttagtatcattggaaaaagataaatcaggttcccatactcatggcttactaagtattaattggggggaggaggttaattcattgtgtggtcaggaattcctttcatggatcagtaatcaacacataagtccaccttcatctggttggaaactgttggtgatggtggggaggggtcatttgtaggaggagatatttagtcatgtgactcatcactgttctaccacatatccacaggaggcagcctttaggctagaactatgaaagcagttaggatggaaaattggaaagtggttccaggggacagcctaggatagatacagattttcaaaaattgagatttaaatgtcagcaacattgctcattaattaacttgtttgacaaacattgagtgccatatcctaccttctggtcccatcaaaaggagtaaaactcagccctcatcctcaaggagcacttagatcaagccaacttgttggtttttaaattgtatttgataatgcattggactttgctaaattctagagaatacttacaaaatcaaatgcatgtctaatcatgtaaaatgagggacacgtaagaataaccgggtgtattagttcattctcatgctgctataaagaactgcctgagattaggtaatttataaaagaaagaggtttaattaactcacagttctgaatggctggggaggcctcaggaaccttacaatcatggtggaaggggaagcaaacacatccttcttcacatgctagcaggaaggataagtgctgagcaaaagggggaaaagcctcttataaaaccatcagatcttgtgagaactcatttactatcacaaaaatagcagcatgagggtaaccgccaccatgattcaattacctcccactgggtccctcccatgaaatggggggattatgggaactacaattcaagatgagattcgggtggggacgcagccaaaccatatcactggaagtgaatagaatttgttgagacaaattgaagagtaatttgttttattgaagtgagtgcaactcattggtattttactgtgttctgggatccaggagcccagtttttagaacctcctccaaccaagaccacttcattattccagcagactcactgaccctttcttatgtacagttttcactactttcccagatcccttgtgtttagatctggcaaaaaaactagttctagccaaagaaatatgcaccctgaccaaacttagacaattgagtatctgctttccacaggctctttctatttcacagcaaccttgcaggccatgtgttaaaaatggtgctatacaagatgaaaggagtctgggatcctgagttactgcttgggagggaaattttcaatctaaaatggattgtggtacaagcagaaataaacctgtcatgtgttaaaccacagaggtttgggggatgtttgttactgcagcttgtgtagtttaccctgactaatatactctgttaccatccttgccagggcatatctggtctttctatctaatgctacctctgggttttagtgggaaagaggcctcaaggaaagggattctgtatatcaatgttgacatttcttcttcctatatatagctgaacattggagagattatgtttgtttagaaaagttttcacaaatcctttgtcatgaagatttcagagaaaggtgaccatgaattgtgttaaggtgactttttatacaccaattaaataacctgattcaatgattgcagggcatgaagagaaacgacaacagtcttgggtgttctgatctgagtagcttgtcagtgcctaatagctcctttgctgcatgtagatacaaatgaccaatcttacacttttttttttttttttttttttttaccctctcaagctagattttctttcctcaagaaaatgtgaaaatgtcactggtcacaacctctaagccctataagtttatgtctttattttatgttctggagagaaaaaaaaattcacaatcagagagaaaagtaatttttccgttactaataagctacgtatgtgcaaaaggttagttttggaatttctttcaaagatcctgtgattcaaagtaaaatatttggtaaactataatgaggtaattgtgagaaatgagacattaaagtgtgtttggagccttttatatatttcaactttaaaaacaatttggtgtctccatcattaaaactaaactttcacctgctacagatctccttctttgctccaaagactattgtttgtttgaacagggtggaaaggaggttgtcagaggccttttacacagtgcaaatgagagcagaaatcagcggggccacaagtgttaatgagagaatggctgctgatcagagcgtggacttggccacagaaagtttatcttgaattttagaagtttttcagttggttattggtggttgcaataaaataaattacttctaaaatataaatattgagtgagtcataatgtcttaaatgattatgaccacagtttgcagaccttgtgttgtaacttaaacttgacatttaagcattcagcctgcatttagaatttctaaatcttaatatgtattactgcacacacattttgaaaaatatatagatgaatatatagcatttataccaatacatataaacacatatttcttttaaaagataggcaaataccatcatttcttcactggtcaactcatggaagtcatgcttactaatcaacttttcatggatctaacattttatgcattcatctataacacagcttttccattggataataactcattttatcttcaggacaagtttgcatatcagggatcagtatcctcattttctttgcttttgagatggagtcttgctctgtcgccaggctggagtgcagtggcactatctcggctcactgcaacctccgactccctggatcaagtgattctcctgcctcagcctcccaagtagcttggattacagggacatgccaccacgcccagctaatttttttgtatttttagtagagatggggtttcaccatgttggtcaggatggtctcgatctcctgaccttgtgatccacccgcctcagcctcccaaagtgctgggattacaggcatgagccaccgcacccagccatcctcgttttctagatgaggaaactgaggctcagcaaatgacattgttactgagacaaatgtttgagccagggaggtgcttggaaagactatggggctctgaagagggcaattaaattaaaataaagggtgagttattgtgaatatatgaactactctaaaaagatgagaaatgtcactctcccactcaaagtaggggaactggatgagtgcaggaccctgaaatgtggaaaggcatttaatgtagggaatgatgcttataagagggtttgaagagctagagcagaaggcagagggcatcccctgtaactattagccaataactccccactcttcctcttccaagccactggtagcttctaacctactttctctctctagaaacttgcctattctaaaaatttcatacaagtggaataatacaatcatacaacatttgtcattttgtgcctggattatttcactttatataatatttccaacatgttacatgttgtagcatgcacagaactttctttctttccatgtctgaataatattccgttgtatggatatgccacattttctttatcaattcatctgttgatagatgcttgggttgtttccatcagattgtcttttgatatgacacatactatcctcagatctacctccctcccttcctcttccccaaagctgctcaaccagaggcttgggtaacaattggccacacccaacttatctaagtctgttctgtcctccattcagatgggagcccacccttcaagacgactatatagaaaataaaactattgtcctgagagaccatctttcttgctatttggcacccactataaatcctcatgggctatatccttttgagagacaccatcattttaaatttgaagatgtgctatttattgttgtttttcagctccagactcacccttctaaattctgctctatgctattggattggagcagaggttttacaaaccacatgttcactttccctgcaggctccatgttaggctctgccaagagggtgtactgaagagaagctaaaagattggagcagaaaaaaggaacctgctccttcttgtttgcttcctgtccctctctgcatcacccaagcatgcttcttcaccccagcagcagcagttctttcacacagtaggagctgcatgcagtgagcggtgtttccaacagttatagatcctacctcattgtaccactcccccaccttgaggaccagcactagctggcaggagcatcttcctcacagaactgaatttaagccctacaaggtccctcttgttagcccagaaacatcatcagcagttgggcagggccctgtcctctgagatctgagtttctgttcctcagagtcattacattatatgttttaaaaatagctcttccctttgtttctgccagccctaaggtggtgctgcttcttgtagttgctacttccatctgtgactttccagttaacttttaaacaattttataactagttaacagctatttgtgttaaattctcactttaagtcctcggttataaggtgtcttctccccgtcctctcccagaccatacacaatacatggacatcgcacacatactgcatgtgcatatggagtaggaacattcccaatcaagatagtgaatatactgtggagggctttagagtgaggccagaccccatggatccagggaccttccctgaaaaggactgaagcccactgtggtcattgaagaacagtggaaagctctggtgggaactgcgcaagtagaagttcctccagatcaggaaccttttctgtctcttgacaaggtaatattgaggagtctaagagagggtggtcaaggtcaggcagtcccaggtgatggaagaaaggtggcttctgaggaatggtatcagaccttcatgtctcctttcttctgtggtgcccataaacaaagattggcttaaacataccaacttagttctactagggcagattaggtgatgggtcctgtacccatctaacattagataccagaatcaaatgttagaagggagcagtgactccctcccccaggggtgagtggcagctataattcataagaactttccactggggaaggtgaatcggtccaagactgacttgcaataaggcttggagctgaagacaagaaacactgatggacatgaaaactattggataaaagtttgaagagggacaaggtattaaattctctgaaagtatttctccacagattatttattaattacaaagggaattatagtaatcaggtgaagaaacttggcagaccccaccctatggaagtgatcaaagttgacaccactcgcaatgggacaaactgacatcatttggctcctgatatgatgcactgagaagggcacagcattgcttatgtaatacacctgtcaaatgcacaattaagcagcttgaattcacattgtggaatagtctgcaaagccactggccggcactcttcaagaatgttatgacttgaaagacaaagaaaggctaaggaacttttccagattaacagagactaaagagacatggcaacaagctgcaatacgtgatcaagattggagcctgggtcaggggaaaattgtcccaaaggacatttttaggatgattggcaaaaattaaatatgggctatctattagataatggtattatattaacattacattttctgagtttgattaattgtgctatgatcagagactctccatgccatgttcttgggaaacatacactaaagtgtttgggggtaaagaaaggggttgagaatagccagagcaagcctaagcacaaaaaaaaaaaaaagctggaggcatcatactacctgacttcaaactatactataagcctatagtaaccagaacagcatgatactggcaccaaaatggacacatagaccaatggaataaaatagaaaactcagaaataaagccacacacttacaaccatctgatcttcgataaggccaacaaaaacaagcaatggtgaaaggacttcctatttaatagatgttgctgggatagctggctagccatatgcggaagattgaaactggacccttacatatcaccacatacaaaaattaacccaaggtgcattaaagatttaaatgtaagacctcaaacaatagaaatcctaccagaaaacctaggaaatacccttcttgacatcggccttgacaaagaatttttggccaagacccccaaaacaactgcaacaaaaacaaaaattggcaagtgagatgtaatcaaactaaagacattgtgcacaacaaaagaaactatcaatagagtaatggacaacctacagagggggagaaaatattcacaaattattcatctgacaaaggtctaaaatccagaatctataagggacttaaatcaacaagcaaaaaccaaataaccgcattaacagatggggaatggacacaaacagacacttcttaaaagaagacgtgcaagtggccaaaaaacatatgaaaaaattctcatcatcactaaccatcagagaatgcaaaaccaaaaccacaatgagataccacctcacaccagtcaggatggctgttactaaaaagtcaaaaaccaacagatgcttctgaggctgtggagaaaaggggacagttatacactgttggtggaaaggtaaattggttcagccaccgtggaaagcagtttggagatttctcgaataacttaaaacagagctatcattcaacccaacaattccattagtgggtatatacccaagggaagatagatcattataccaaaaaatatatatactcatatgttcatcgccatgctattcacaatagcaaagacatggaatcaacccaggtgcccatcaataggcaattggatgaagaaaatgtggtaccatggaatactatgcagtcataaaaagaatgaaatcatgttctttatgtcaacatggatggagctggagggtgtgatcctaagcaaactaatgcaagaacagaaaaccaaatactacttattctcatttataagtgggagctgatcattgagcacatagggacataaacatgggaataatagatgctgcagaatactagaggggagagggagggagggggcatgggctgaaaaactacctactgggtgctatgctgactacctggatgaaatatacccatgtcgctaacttgcacatgtacccacccctgtatctaaaatagaagttgaaggtttaaaaaaaaagaagaaagaaagaaaggggttgaggatgcaatgaactctcaaacagtttaggaaaataaagtgagaaggtgaatctcaggatacacatgagaaagagagatagggagattgagagactgtgggagaaagagagacagagagagatgggggagaggacttatactatgagagtttttgtattattctggcgactcttctggaaatttggaatcatttcaaagtaaacaacatgaaaaaaaaaaaagaattggggctgaaagatgcaagcagccttaagacatttcccatgtttgtatggtttcctctctactgtgttgcccccgcacttgacaggacaaaaatggagtagcgctaagagggtggagatggagaggaataaaagtataaggtggaaaaaagaaaagaaaccagccaagtccttgtgcccaccatggcttccagcctgaaaaaggtctgagctggggttgaggagaaagatgaacaccacttccaggttggaactgttatctatatatgtcacagatgtcctaatatcagaaataagacagtatttttgacttaaagtgcatgtcgaactcctgagacctgcggaaacttttacctaaagcaggggaagatgattaccactgaatattcaagtggtgagaggccagaaatacagtttcatctttaatcgtgtcccataagtaaagttctctcctgttgccagtctgggagaaagaggtcgttttagttaaggaagcctgctgtttctttgcactctcattacataattacttgtagaaacccatgcttgacagagtttctcacttattgtaaacagcgtggataatgccttagaaaatctgttaacttcccagttgtcaggtgacatcttgaataggggtgcttaagaatggggcattgagcagcagctggcgagggctaaggagacagcttccccagcctcgcagtttgggcgtggcttgacttagaacccacagacttccacagagcacctccgtgatggggccctgcatatatagttttattcctggtatgatttgaaggtccttgctatgggattgcaaggcaggtgttactttcttcacctcaggaaggatttacaaaggactccttacacttagatggcctgagagtcattcacagagcctgagacagacagaaggaagggtcaggtactgcagtacatgggcccaggagatctgagatgggtccctgccctgcccctgcttggctaaaggaccttggatttctcacttcaccactctcgaccttggcggcttgtctcatctggaaatggaacatgagagttgtcagaattaaaatggagtcactatgttaaaaacccaacctcacaaatagagccagggaaagccatgaagagagggctcttacgtttgtgtgcttgataacacaaactgtcacaaaagactgcaaaagccgcaaccctgcacagaggccatcacaaccttacacaaagagtacttctgcaggaacatctgcgcagcaactgtctgcccaaccttgactggaatcacccttggtattgatatttgtagccaaagatagttacctcaaaacaatgatgtgctcacctcagttcttcctctaaaaacctttgtattccttcacctccctaactatgcatgtaatttactgtggcacatgtattctcattgcaatgctgtgttcccaaatcaatatcttattcttttacagagcctctctctgtttgttatctaggttggctggaaagtggtctcaactctacccacagtcccttctcatccatgagtctctgattatcttctttggagagatgctcagagctcaataagcccaaatagtcctttatcactcagggtacagcaggcaacagacagcatgctcaaattgtgttatttgaggaaagtgtaataaagggaccctttacaatgatgtgggcaggttacagggcagccacaaggagtactgtggtgtttctgggctagtaatcatggtgggcacttaccctcttcaggcctaagagcgcaggagcctgagacacagagggctggggttggagggatttggccagcctgcagtgaccccagagagggatcaggagaggacatggactgatctcacatttctatccccatctcttctgcagcccatgacgtccccattgactggagacaaccagaagttggagagcaggggagcccattgatgtggccctttgaggtcagacccatggcatagagcaggggtggaagcagggctggaggggcaaatgagagacatccagcacagggtacccttcatcccccagtgtttatgtttgtcctttacccaggttataaatgtgtgtccccaaaaaggacaaagtcattcaaagtcccaaaacctaaaatattagccaccttcattcaaggtaatgaggggaaagggaaaggaatggctgatgtgtataaccaccatagtacctgatggagcaggttacaagtccaggttggccatcacagctgccttcttcctaccacccttctacagttccctttgtcttatgccagtttcggtttgcctaagttctttacctagagggatgagctaagccttcattctggaagtatctctgtccttggagatcttttctccattgtctaagcctactgggcaaggaagtactaagaaagttcccagtgtatctctggggatccacacatagaactccattcccccattaggtaacttgctccttggttattggaatcaactactgtgttcaacacagtgaccctttctctgcttgctgattaagcagcaggcagatttctccccaaaacgcatgacttggaaagcatgttccccttggacactgtatcagtcagggttccagcaaaaaacaaaacaaacaaacacagaacaagtagcatatatacatcaagagatatattgcaaggaattggcttatgaggttgtggcagccacctaggcaagtctaaaatccagagggtaggccatcaggaagggccacctggaactctagggcaggagctgatgctgcaggtcaaaggcagactttcttcctcagggaagcctcagctctgctcttaaggcctttccactgattggaaatctccacccagagtgtagaggacaatctccattccttaaagctagtgattgtagatgccaatcacatctgcaggataccttcacagcaacacccagattcatacttgattgaataactgggtattacagccttgccaagttgacacttcaaactgaccattacaggcactaagatctccacaccctcccagtctaagaagatagggatgggatgcaaacatccctccaaagagtttcacgacatgatagtgacagggatactcttatctcccccactcaccccccagtcccatggattctgactaaaggaaagacagcaccaaaccttagatatctttaaggacacatggggcagaggtagacagctctctgacctcccagcatcttgtctcccacctagaactatacccgagccatcctcaggccactccactttttattaaaccagaagtttctgggtgatgtggccctttgggttaatctgggcatgagttcattgccacacttcctttgccctaaaatatgtcacctgatcagaggtgataatataggatactatggcaatgatggaggaattctgcaagtgcgggaatagtggtactgatcaaagcattatgaataggcatgttagtccattttgtgttgctataaaggaatacttgaggctgggtaatttatttttaaaaagaggtttatttggcttatggttttgcagactgtacaagaggcatggcaccagcatctgcttctggtgaggcctcaggaagcttttactcatggtagaaggtggaaagtgagccagtgtgtcacaggctgggaaagggtgggggggtgagagagagagagagagagggagagagagaatgatgctaggctcttttaaacaatcagatctcacgtgaactaaaagagcaagagtgcactccttacctcagggagggcaccaaaccattcatgaggatctgcctcgtgaccaaaacacgtcccactaggccccaccttcaacattgagatcacattttaacatgagatttggaggggacaaacatccaaactatatcaatagggaaggcaaatctgtatcagagatatatctatctctgtgaagaataagttctaccaccttcatgatggaagggccctgtgggggttactttcatgtgtcagcttggctgggacatggtggccaattgtttggtcaagcaccggactagatgttccggtgagaagatattttagatacgactggtatttaaatccatggactttattaaagcagattgttctccgtgatgcatgttggcttcatccagtccactgaaggccttaagagcaaagactgaggtttcctgaggaagaaggagtttccagcctgctgccctatggaattcatactcaatactgcagcatcaactcttacataggttcagattttggacttgccagtttccacagtttcgtgagccaattccttaaaataaatctctttctctctcttctattggttaagtttctctggagaactcccattaatacagggttcaatataatcaacttgctggtatccctgggaaatagtaacagcttagaggctcagatacagtctctgctgttgacaaattggaaactcatcaatagctgtagctaaatcagccctggcgaggaaaagtccatagtgatgaacccatgtataaacctccacccctgccatatggccactttgtatctgagcccattgagtgagccacatggttagtcaacctctacaggacaggtcaacttaaccacctcaattattctgctcaagctgctgtagcgagataccactgactggttagcttaaaccatagacatttagtttctcaaagttctggaggctggaagtccaagatcaaggtgtcagcaaggttaatttctggtgaggactctattcgttacttgcagatggctaccttctttgctgtgtcctcacttatcctcttttctgtgtgtgcagagaaagagctctctggtgtcttttccttttcttatcaggacaccagtcctaccagattagggccacactcttatgacctcatttaaccttaattaccaccttaaaggccccatctctgaatatagtcacattgaagagttagggcttcaacatgtgaatttggggggcggggttagacacaattcagtccataacaccacctgatttttgagaacctcctccacagtgaatgccctgtagtgaagaaggcatgaatatccatgcccattctaagagatccatccacatactcccagacctctttatcatcaattttcaagtcttgttccaagtcactgactggctaaccaatccgtcagtcactcaccatggattggactggatctacacctctggccacctttcctgattgcttcctggatctgcatagatatcagcacctcatcctcagccttcctcaccgcctgattttcaagctttctggcctaggctatgacctcagctcagatgttgaatttaagtgtaagcttgcagagcaaaagaaactaatgaggattccctgagtaacaatgagtgaataggcaggagcccagtggtgggcttgcagatggctaccttctttgctgcgtcctcacttagcccccattccccaaagcatgtgccataggaccatcagaagccagctggctcccaaatgtttagaatcactataggatcaaagtctctttacactttgccctcaacttgaactttatctcatgccagcactgttcataatttgagtaataacacatcacagtgtgccacggattacctgtgtgccatttccccttggcaagataggtattacggggcaatgcaaatagatgagcaactagtggcttgctggtaagtgttgaacaactgattcttaaaaagaaaggaggaaggtgaggaaggttagaaaggaaaggagggagaaaggtagggaggggagaaacaaagaaagaaacaaaaaagagaaaagaaagaagccctcattggtagcatttgcaaatttctatggtataaatattccctactatggctgatttcaatctaccaacataatttcactgaacacgtagttggaaagagatgtacacagtcagctcttgtaagccagtcatagctggctccagcacaccacgtggctatctcaatcttcagagtctgttctgagggtctgtttcctggggctactcctggaacccattactgtatcagtcagggacctagcaacaaatagatggcccactaatagggagtaatttgagaaaattttaacaaagtaattatttacaaatagtattttataattatttaattatcagttaatttaataattattcattataattaataatatatacaatgtataatatataaattatataatatatttattataattaataattatagaaatatatttttatattatattgtatatatagatgtataaaatatttaatatataaattgcatattatataaaatttaaatgagatttataagatatataaattaattaattatatttataatttataagtatgcatttataaatttatatacattatttataatgtatatacttaattattatcttattaattatataattatattattagttgcctaattacacttatataattaatttatatagttatatttatataattataacaaatataactatataacttataattatattttatctatatatggaaatattttatatattataacatataaatagtataattataatgaaaatatatgaaaatataaataataaataattattcatttaataattatttaattattatttacgagttaagagtgggtagggtctagagaaaccacaaaggacagtgaaggtttcttgggctagtaagagcagggctctgttacagtccctgggcctgaagtgcagagggaaagagcagttactggaacatggagacagagagaaagccacgtgacaagtcctgggtgctttggtcaaggaatgaagccagccttatatcaattccttagggagggagctgtaatttcttttcctcctgccctccaaactacaatttttcctcgttggtagggtgaccaatcgtctcagattgcctgggattatcctggttttagcagttaaagtcctaaatcctggaaaatcaattcggtgatatgcacagaagcttgggggaaatgtgtaaaaaccatatggtggcccaaaaaataggggctgaatgcaatactgttttggctgtaaatgggtacagtgcagatgatccaccttccataacccctgttgctgtttctcccctgactgctcaggttggggaccacaacttgtcattcagaatagtggatcatccacggttgcaactttcccaaggttgcaactaagtgtgcgtcacaagtacactgcaatcacaggcattaagagtctgtctttgactttacctgtgaactaactgttgtcctttgtatcaagatagtgctcatttaatttttagcagttgtaaatattgtggccatattttctaagagttcagataattaaaaaagatagtgattacaataccaatgctggcgtaaaccaaggcatcactggaaaagaaggctaaccaactgtgttatcttaatgacatatggaaggacatgtacaaccagattagagaggtaaataatcaaaacagagcacgctgctcaatatgcagaaaagagttttgagccaggcacagtggagaaggggatgtgaaagtgcatgtggagacgacatctcacaattctaagatgaaaccgatatccctaagtcaatcaaaaaacgttgtctaccaaaaaatgtccagtcaaaaatagcagctgctgcattagctcagtcataccacacaaatcactttatcaaatcactcttttgatcattttataggattcagtaaggctatatttcctgattcagaggttacaactgaaatgtcttgcaaacaaacaaaagagatgaataaaaacaataagagatgtgttggtcccttacatggtagaactgatcttttcctatcttccccacaatcatgctttctgcagctctgagtttataagctcttataaactcagaatataaacagcacttatcagaatataaacagtgtttctgcagcactcagtttataaactcagaaaatgtaaaccaaaagattactgataccttatctgaataaaaactagacatttacatctctaaccccagtgccttgggaggctgaagtgggaacctttcctgaggccaggagttcaagacaagcctgggcaaaatggtgagaccccctgtattagtctgttttcatgctgctgataaagacatacctgagactgggcaatttacaaaagaaagaggtttaatgaacttacaactccacgttgctggggaggcctcacaatcatggtggaaggtgaaaggcatgtcttacagggcagcaggcaagagaaaagagcttgtgcagggaagcacccctttataaaaccatcagatctcatgagacttattcactatcatgagaacagcatgggaaagacctgtccccatgattcaattacctcccacctggtccctcccacagcacatgggaattcaagatgagatttgagtggggacacagccaaaccatatcaccccccatcactacaaaatatatatatataaatacataaaaagaataaaaataaaaactagactttgttaatctacctacagatatgactgagaatgcaaaggtaaattttggcaaattattttcagtctataaacttcttaccaatgaaaatggaaaactcttatctgctaattgtcatatatttagggggtgtgatttgcttatctgggatattgatgatttcataatgaaagcttttggtcagctttcatttctttcaaaatgtgtagaaacaatgagacttttgactttgtagaaatggtaggaggtagtctccttagacgcatgcctacaaggtggctattatcattgcctgccatagagaaaatattaaattgttggtctattgcaaagtaatattttcaaagtttgggataagaaggatgtccctgtttaatttggaaatacactgaggctgataatggagacaaggacagaacttatgtgctctttctccaaaactgtttggtggtatttgaagagcccataaggagcatagaaaaggatgggcagactggacttcagttatttgatgttatgtggacattgtgaaaaaactcactaaaaaaaggacttagcagatgaggacaataaggcttagattcattctaaaaagtgatactttaaaaaataataataaagcaggtttaaaactataaaaaacagaaaatggcaacagagctttcttaatttctctactaaattggtagtttatttgtaatccaatttaagattttaaaacttaaaattatctctgtgctttaataccattttctgtgagaaacaaaggtttaacttataatgccatccaatgtacttcagactaggtaaaatgatggccgttttggacatgactgactcatataactaatttattgatacaaagaatctcactgagaaacatctggtttttcaaaataagtctttagatacaaagtggatggacaatcttggagagctgcaaactaattcttgcttgtctaaaaacttgttcttgctagcggattacatggcaaaattttaaaagggtttcacagaatgtatgtgtttactatacattattattaccctttctccagagaaacagaagcaataaaaaagctatcatcttattgtctatctatcatctatctatctatctatctatctatccatccatccactgagaaatttatttgaaggaattagtccacacaattggggctgcaaggctgagatctgcagggcaggtgtcaggctggagactcagggaagagtagatgttgcaaacctgagtccaaaatccactggaaactcaggcagggtttctatattgcagtctggaaacagagctccttcttccctgggaaacctcagtctttgctctgaaggcctttgactgtttggaagaggctcattcacattaaggaaggtcatccgctttactcaaagtctgctgatttatgtgttaatcatatctaaaacatacctacacatcaacatctagagtagtgtttgacaagacaactgggcaccgtagcctggatgacacatataattaaccattaattcctgtaggggcgccacattaaaatgctttttttgagaacattgttagctcaatgtcatcaccttgggctgacaccagggctcagtgtaatatgggcttgataagaggacagctgtggccgggtgcggtggctcacgcctgtaatcccagcactttgggaggctgaggcaggcagatcacttaaggtcagtagtttgagacaagcctggccaacatgatgaaaccccgactctactaaaagtacaaaaattacctaagcgtggtggcagacacctgtaattccagctactcaggaggctgaggcgggagaattgcttgaacccaggaagcagaagttgcagtgggccaagatcacgtcactgcactccagcctgggtgacagagcaaaactccatctcagaaaaaaaaaagaagacagctttaagacgaagtgaattttacatttgactatgttgagtttttctactacatgcaagagaaataaggatgtactaaaggctcttgaaagttcagagaagtattagcagaaaaggaaacagaaggagcaaaaatatcctactgtatcattgaatagaaaaaaacatattattgctattttttattaaatctagataatatctacttaattagtcctattgtatttatgttttcttttaaagggcttacatttatgtatcttagagatatacaacaatgtagcttacaaaatttaagaatccaataaacagttaaaataaatttctggtatcagaggacagaaagaaacattataaaaatattgttttctcatatattatttgttaattaatcctgctatgaattactcttaattgccactattacctagtactactattattttgtttaaataatagcatttatataacagaaaatattgagtaacatatataaattttaaacaaatacctatttttcatatcttcatgttaaagtaataacacgtgtatataagtacttatcatatattatgttactgcggggggtggtggttgttttttagtcttttaaaaatattttattttattttttcttcaacttttattttaagttctggggtacatgtctaggatgttctggggtacatgtctaggatgtgcaggtttgttacataagtaaacacgtgccatggttgtttgctgcacagatcaacccatcacctaggtattaatcccagcgttccttagctattcttcctaatgctctccctacccccaaacccccttccccttatttttagtgttttttgttttttgtttttttgagatgcagtctcgctctattgcccaggctggagtgcagcaacacaatctcagcagctcactgcaacctctgcctcccaggttcaagcaattctcctgcctcagcctctcgagcagctgggattataggtgtgtgttaccatgcccggctaatttttttatttttagtagagatgggattttaccatgttggtcagattggtctggaactcctgacttcaaatgatcctcccaccttggcctcccaaagtgctgggattacaagtgtgagccaccatacccagcctgttttatagtcttatatggccctgtcccaggttgattctctaaatcattggtcattctgccattggtcagacatagccaggagccagagagtagggaacctgttgctataacccatgcagataaaggacacagaacagagcagaggtaagtgaagaatgggtttggagaagcaaatggcagccctctgagttgctggcttgttgttggtattaatatgatctcggtggtccaagaccaccaacagcacggcaacactgacagttcagcagggaaatggagagtgccgatttccacagaggtaccagggtttcccagggctgcttcctaatctcctttcaagaaatggtagcacttcttatatcccagagagtgtcaagtgagtgcgacttttcgtccctgtgtctatggccaaaagcatgcagtcatcttgtgcttcagttttctcttcatcctatggctcagttttctcttcatctgtaaaatgaaaaaaaaaaaatacagatttgttgagggattagggataaaagatatgaaggtactttgaaaaatgtaagaagtgaatgatttactggcatttctctcttctgccattcaggccactggagcacttttcaaaaaataatgctattctaaagttggatatttggttctaaccaggaagtaataactatcataataatggaagacatttattgagggctgactgtgtgccctcacagtcaattctcacagagaatctgtgggacatgttttcccatggcttatcttctttaatcctcagaacaactgcaggaagttatactattgatgtatgttgcagatgaggaaaataaggcttaaagcattaaataacttggcccaagtttccataacaaataagtaatagatctgggacttgaacccaggcagtctttagaccactaagcactctgacttcctaatcatagcactttgtaaagccaaggtaacaactaggcgactatttcctgtagggagattgttttgataaaatattgcagaatggtcatgagaaatatacacaacggggaaagttaaaccccatcaagatttatgctttgagccccccatctgtatcaatgcagagtaatggtagagtttttaaaaatgaccatgctgaaaaaaaagataacatctctgtgggctagaaactcaaaacggaaatcagctactgaagctagcagcctactgggttgtgaatctgcaagcagtcaaaggaagcagagagttcattttctgcagtgattggaaggcagaagaacagagccagggtggaatgtggctccctcttataagagaatataaaatgcttacatcaacccctgcataactgaaaatacaagatgagagaaggcaaatacagccttgcatccagcatctggccattttactaagtggctcagtgactagaactaaaatatccccagttatctctgtaagatgagcactctgaaagcccactgtaagatgtgattctgaaccagagactctaagagggcacatagacacaagaaaccactagaaaaggaatggtgagtacagggccactgcaacaaaatgaaataaaacaaaaataaactaattaaaaaaaattaaaagtcaagagatgaaatcacttaagagaaaatgaaatcaatgatgtaatctgaaaatgatttaaaaagtcactatgctgaatatcttctaagagttaaaggaaagatgaacaggatgtttttttaaaaaaaggacaagaaattaagaacttgaaccaggcagaaatgaaaaaaagacagatagatatgaaaaagaatcatttagaaatcttggattaaaaggcgaaagcagctaattactgaaatttacaaagcccaatagatgggataaactttagattggatagctaaagagaaaattgacaaactggaagatgattatggaggaactcatctagaatgtagcacagagtgataaattatccaaaaggccaacaatgaaagaatatgtttgacatcattagtctcagattacatttttaagaaacatacatattggttgcatacatattggttacaagtcagtcctaaagcaaaatgaaacagaaatgctgaaaatgtggggatataagaagctgccatgtgtaaaagctgaacaaatgctgtattagtcagggttctccagataaacagaactaatacaatgtatacagagatagacagagatttcgtataaggaattggttcacatgattatggaagccaagttcaaaaatccgcagggtgagttggcaagctggagacccagtggagccccagcagcctccagacccaggaagagctgatgtttcagtttgcatctgaagagaggaaaaagttgatgtcctagtttgcaggcagtcaggcaggaggaattgtctcttacttgggggagggttggcttttttgttctattcaggcctccagttgattagatgaagccaacccacatgagaaaggacaatctgctctgctgggtctcctgatttaaaaatgaatcccattcaaaaacaaccgcacataaaaaaccataataatgttaatcaaatatctgggcatcctgtggcccagtcaagttgacacacaaagttaaccatcacaattggccttggggaacttaacaggcacagcaccctggtcagccagggaaatagagggaggaagtgcttgctccttcttggcaagaaaagagaatagatcctaagcatggaggtctctaggtgcagatggctggagttctgggtgctgtgttagaaaacacttgtgctttgaagccagagatgcctgagtgagactctctcctatcagccgtttgtctttggatgtgttacttaattcctgagtttcagtttcctcatcttttaaaagagactaataatagtacctatctcaaagggatattgagaggattttaaaagatgatatataaaatccttagcaaacatctgacatatgttagatctctgatggtcagcactggaatgtggacagctgagccaccactggtgacaccatgactggggaggactgtgaagaggaatgagccaggacataagagccaacagacagcaggtctaagtcctgctctgcctcctactagctgtgaagcttccattcctctttcacagggtgtttgcctctcatctacaaactgagggtggtacacctacctccagacccgtgtttctgaactgagggacactccccctgctggatgtccagtgacattcggctatgtctggagacatttttggttatcacagctgggttgggggtgtgaatggcacctagtaggtagaggctagggatgcagctcagcatcccacattacccaagacagtcccttacaacaaagaattattcaggccaatgtgtcagttgtgctgaaattgagaaaccctggggtgaaaaacttaaatgagatcatgtttataaaaggctcggcttaagagataaaaatgaaggctatgatcctcctcctttttctccacctcctccttccatgaaagtgattaggccaggcacagtggcgtgcacgtgtagtcccagctacttgggaggctgaagctggaggattgcttgagcccaggagttggagactgcagtgagctatgattgtgccactaccagcctgggagacagagtgagactgagtctctaaaaaaaagatggaggggggaaagaaagagggattagatagacagtaggtaggttcctgctcttcttccccatgctttcttcctgccatggctggggactagcgaggagaaggaagtgtgactgtcccactgcagcattccccctgctcagagcccaggaggaagggaactcacttgcagctttgcataaagagagtctgccagctgcaagccaagttctggaacacagcttccgggcagcggcctctggaatgctttctggctctctctgcagactcagcctcctgcagctccttggctaacctggcaggaacctcagcccaggccaaggaggctgcagccaacccgagccccctgatgggcttccaccccgacctccacagctgctggtgagatttggctcagcccttagtcatgacccttccatagactgacttctttaaaattcacgaagccttttctttacaattatgattatgcctgtcctgtgtgcaggcaccgaaggaggaggagatactaggaatgaaaggttaagggacagaaaaggaacatccagtcctcctgtaaaagctatctctctgtgttgtccttggacttgagtcttcctgtggcctgtgactaatgctcacatccctgaaatttcccaggacagaaaagacccaatcacacaaccccagaagaaaaacaccaacaaaaccaattttctctacaaacgtgcatgtgatagctccgaccagttctctaagccattcccatcagcccagggttcacaatccagccctcggctggatttcaaaggtgggaacaggctgggttcatgtctgtaatcccaacactttgggaagccaaggtggaaggatcacttgaggccaggagttccagaccagcttgggcaacatagcgagaccctgtttctaaaacaaaaacaaacccaaaaaacaaaaaacaaaaattaggcaagcttggtgttacacgtctatagtctcaactacttgcttgaggatgggaggatcactggagcccaggagttgaaggctgctgtgagctatgatggtgccactccagcctagagcctaggtgacagagaaagaccctgtcaaaaaaaaaaaggggggggggtggggggagcagacagaccacactcaattcatcaaaaggagaattgctacttttcatttgtttagctacagtagaaaaagtctaatcacataactttccctggggctgcggaagatttctcctttgaggcagttcctcacagtaacactgtaatcgaaacaaagcctgctcttctcatgcggagcatattttctcctggagaaccacaactgggtttgcaagggtagagccaggctccttcccataacatgcttgccttgcctgcctggggttgaacttttttttttttccacaagagagccataaacacatagataccaaagagttaatttgcgttttttaaaccttcttcccaaagcctgctctcattcctgcataaaatccccatgtccagacatcaaatcagtaagccctgttgcctgtcagagaatacaatgtcaggccattagtatgttaataagtccggagggcgacaggtggcctactagacagctcaattaagctgctcattaaacacacgctaacgaacagccgaggcagggcctgaacagcaccattctgtaatgacatgatgtcagagtgaacaaatgaggaaaaataacaaaaacattacagcagggacagacgccactaataaggacccctcgcactacatcagcccgcaaatcaatgagtcaccgggatcaaaaaactcgacccaacattctcaggagactgagtgcagcaagatttttttggtcactactaaaaaaaaaaaaaaaaaaaaaaaaaaaaaaaagcccaaacccaaccctaaaattattgcaaaatatcgcaaattaactgctttaaaaaaatgaaaaagagcaaagtttatttgacacggagctaatcacgaagtctgagaaatctgtattgctgggtttaaatgaaaatcattatttaatgggatcattatttacatttgattggcatcctctttttataagcccacaggtttgaaccatttctctgctctggtacccaggcagtagaagggcacagtggaacggaaggagcgtgtagccaaatttcttaggtgaagattctgcttgtcattattttaagagaagggacttccagcagctgctagaggtttctctcattttcaagtaaggcgcttcctgaataataaaaaatcaaacctccgccaggcatggctctgacattggagacatatattgctaaactaataggctggctggccattaggagatcacgacctcggctcttatcttttgtcaagttaacagctgacacctcctctgcatgtagactttcttctaggcctaaggtagatgctgctcctctagctaagctggtgagctgaaggcaggcaggaaaccagtgcagttgggcttaaggagctgacgcagagtccctcggaagcatggttctttccatattggttgaactttctctgcacaaatctatggtccaaatctatgagtgaggcagataaggctctcacctgagtgaccctgagcaggtccccttaatccctggctctgtttccttattcatatttattttatttttagagacagagtctctctctgttgcccaggcaggagtgctgtggtgtgatcatggctcactgtaacttcaaactcctgggctcatgtgatcctttggcctcagccactggtgtagctgggaccacaggcatgtgctgccatggctggttaattttcagaattttttttgtagagatggggtctcgctatgttgcccaggctggtcttgaacttttgggctcatgtgatcctcctgcctctgcctcccacagtgttgggattacaggcgtgagccactgcactcagctctttatttataaaatgtgattggactgggatttcgccttgccttttccattctagaaaggacttcagcacaaaataagagtaaaatcctcatggaatttgccatctggttgaaaagaaaaactagtggctgaaaatagtcacgaagaattcaagaacacagtatagtgtgttacctagaattataagaagaatttaaaaaagggagacattggggatttgtaagggctccaggccaattccctgaaatcagctgggcctgagtgggtggagcagacgcagggagagggcggagcttctgccgaccttgcagagtgagtaggatggaagggcaggaggaggtccaagcgacaaaggcaggcatgagcatggggcctgcatgcgtctgggtgtatgtggacagtgggatgggagctacctgtgatcagacctgctacatggaggcaagctggggggtgcaaagccagaggagacagatgtgcaggggcagaggcaagagacatttggtgagtgcagaggccacagcaatctggctttttatctcagtgactctaaggtctgtcttcaggctgatggatgtgacagcatgccatcactcgacagatatttactgaggttccctctttgcttgaggaactgtggggaatacaaaaatcagaatattctggacctgccctcagggagtttataatcgagtcattccttcaactaatatttcttcaaggacctctctttgccaggctctgctaagaataatggcaaataatggtttcttggtcccagccctcgtgagtttatggtcaaagagaagagacaggcatattatttgactaactccatttcaagtcagactgtgatgaatgttgtggccaaggtgggaacagagacttgtaggaacacagataagggtgtgcttaagtctgtctgtgagaatcacagaaacttccaggcaccttcaagggctctagagcagcactgtccagtagaacttgctggaatgacaggaatgttctttacctgcattgtccagtgtggtagccacatatggctgttgagcacttgagatgtggctagagtgactgagaagctgaattcctcattttaatccattggaatttaaatagtcacatgtgattagtggccaccatattggatagtgcagctgtaaaatggttaataaaatggtagtgcagatgacatgactggtggtgcgatttatgtggaatgacatgtcttcttccttacaaagggcactttccttctgtgcaagggtagcaacatcctagaagccagagaaatagctgttccttcagtaatgctatatccctttgaccaacatctcactatcttcataggccacacacagtgggtgtattgattgatgctggcatagacacactgataggtaaaaaatgaaaaagaattttagatatagaacgtcttttctcctcttctcttctagtctgagttcaaatctctcctcttctggcaatgtttggtcttccctggaccatcttggagagctgagaaccctaaaagcagcaccagcctgcccaccagggggcagcgcacgcaccatgaggttgttcactgggcttatcaagatctatctggctagggttgttttccaaggattgggaagaatcgcttcggtccttctttggaatttgctctgaagtcttcttcccttcattgctcctgttagatgctccacaacaagtgaagaaatgaggaaatagatttctcttcccacattaaagcaaagttaataaaatggtcatgggcactggagaagtctttggctttggttttgtttatgcgatcatttttatgataaagataggaaaggaagagtcccaaagccaaggccattgagaggagatgagtggggatttccactcaaggatggcgagttgaatgcaggggttagcctccagtccctcctgaaaccccactaaagcaacaacaggggaggtattttggaagacatataaacctacggaatgaagagaacagaagcaatgataatagcaataaaatctgaaagtttggaaagcaaatgtaagtttggtaactgtgatggtgaatattaggtgtcaacttgatgggattgagggtggctggtaaggtattgtttctggatgtgtctgtgagggtattgccagaggaaattgacattgaagttggtgggctgggagaggaaaacccaccctttatgtgggtgggcaccatccaatcagctgccagcaaggctagagcagagcagacgcagaaggagaaggtgcaatgagctggcttgctgaagcttctggccctccttcttcttcccatgccagacacttgcttctgctcctcctgcccttggatatcagactccaggttctttggcctttggactctgggacttgcatcaacagtttccctgagggttctcaggcctttggcttaaaggttgcaatgttggcttccctggctttgaggttttcggacttgaagtgagccactaccagcttctcactttccccagcttgcagatggcctattgtgggactttgccttgtaatcatgtgagccaattctccctaataaactcccttttatatatacatgcatcctattggttctgacctctggagaacctggactaatacagtaactgatgcaacagggctgagaaagcggaaccataagcagccagtggggcaagctaaagtcaacccagttgctcataaactggtgacaccagagacctatggaagtgggaatcaaggtggatctacaagcagaaggacagattaaacatccttcaggtccttttaagaagtagttagatctccagccttcctcgcttattcttcgatgtcaggcgagagaaatgttcgcattccaaacgttgagatcactggtcattttcctgatcatgtttccagaataatggtaataaggactatagcttccatgggagagccgtgaagccttcactgcagctcttccaatagtatgagaggaaagagtcatacatactgccatccaagattccccagggaaacggcccaagcaggtcactgtgctgaagcccagacaagccccatgtaaatgcacagagcttaccatcagctgttagtgacccattattcaatacggggagatagttaaagaccatttggtatttgagaacagcctctaaggcagaaccagagaaaggtggaaagtaactcagagctaacataagttatagaagctatgaagggagaagaaatgtttaaaaattattaatcattactattctaagaataagctattgcatccatggaataagaataagatactaattttatttttaattgacaaatgataattgtatttattttatgagctacaaggtgatgtttcagtacatgtatacattgtgaagtgatcagttcaagctaattaacatattcatcacctcaaatagttatcatttctttgtggtgagaacatttaaaatctactctgtttcctattcttaaatataatgtatattaactatagtcaccatgctatgcaacagataaccagaacctatttctcctgtctttgtaccctttgaccagtatctcccctttctccattctccttttctcccctgccccagcatctgacaatcgccattcttctccctgttttcatgaatttgactttttaagattcaacatataaataagatcatgtggtgtttctgctccaaaccagttctctcgaacttagccaaatgtcctccaggttcatctatgttgtagtaaatgacagatgtccccttcttttttttaaggctgagtagtattgcatttgtgtgtgcgtgtgtgtgtataaaatattttttatatcaggcactttggttgtttccatatcttggctattgtgaagaatgctgcagtgaacatggaagtgcagacatctctttaacatactgacttcagttcctttggatatatacccagaagtggggttgctggatcatatgataattctatttttagttttttcaggaacctccatactgttttccataataactgtactaatttacattcctgccagcaatatacaagggttccttttctccatatcctcgccaatacttatctttcaactttttgctaatagccagttgaacatgtataaggtaatatctcattgtggttttaattttcatttctctaatgattagagatgttgagcatttttcatatatcttttgctcattgtatgtcttctttcgagaaatgtctatttgtctttggccattttttaaaggggttatttgttttcttgtttttcagtagttcgagttctttgtatattttggatgttagctccttatgcaatgtgtaatttgaagatattttctcccgatctgtaggttgcctcttcactccactaattgtttcctttgctttgcagaagtttttttagtttgatgcaatccatttgtctatttttgcttttgttgcttgtgtaagatactaattttaaacaaacattcagagaacaaacaaaagtgcttggaaacaggagaagtaaaaaagttaagaaaatctctcaggatatagagtaaaaacacggaaaataggagagaagaaataatgaatttatagaaccacaccagaatgtcaaacatccaaatatggaaagtagatttagagacaatggaaggcaattttccaaagaagcaattcatgaaaacttcccaggtatcaagttcctgaatcaagttcccaaggtatcaagtttcacaattgtacctagcactatggatggatgaaaatttattcactgagacaaatcattgtgaaatttcatcatgatgagaataaagagaagatcctacatgtttccagagagaaaaaagataacatgctttatacaaaggatcaacaatcagaatgtcattggacttctccaaagcaatatggtggaagacaacagagaaatatttcactatttgaagaaaaaatatttctaaaggcagaattttatacccagcaaaactattaatcaaatgtaagggtataaaaaataggttttcagacattccaggccttatactaaagctattggaagttttttttttttaaataaaaaaggagtaaaattttaaaagaggaagatgtatggtccaggaaacagagactccatcatagaagggaggtgaaggaaatctgcactaatataataactgcatagtagacttataggacaacaatccagaaggttccagaagagactgcttcaaaaagatggaattattgtgcttgaacaaattgagaggagggcacagtttggggacaaatgattaaaacaaacaaaaaaaattgtctttgtttataaaaaacaaaatatctacctatatggattagagaaagtaagtcaggtaaaaaagggaatttttaacctcaggaaaagcataagttgttcagaaatggaaaaataaatgtagtatttatggttcagtgattcacagtatttaaagaattataacaatgtaaacattgttaaaaagtaaattgaagctggttgctccagcttacccctgtaatttcagtactttgggaagccaaggtggaaggatcacttgaggccaggaatttgagaccagcctgggcaacatagcgagaccctgactatacaaaaacctttttttaattagccaggagttgcggtgcacacctgtagtccagctacttgggaggctgaggcaggaggatcctttgagcccaggacattaagaattcagtgagctataatcgtgccactgtactctagtctgggtgacagagcaagatcctgtctctaaaagaaaaataaaataaattgaagcacaactttaaagaatatatttgagcaaacaatgattcattaatcagacagctccaaacgaggagtattcaagagctccaccaacagaccacaaagcaggagacttttataggacagatacagaagtaaagcaaagaaaaatttgattggatatagttatccagttgccttatttggtctatgtccgttagtccattcttgcattgctataaagaaatacttgaagctgggtaatttataaagaaaagaggtttaattggctcatggttctgcaggctgcacaggaagtgttgtactgacatctgcttctggtgaggcctcaggaagcttccactggtggcggaaggtgaagaggaagccagtaagtcatatgacaagagcaggcatggcggcgggggaggagggcaggtgcacacacttttcaacaaccagagttcacgtgaacttatagtgagaactcactcatcaccaaggggatggctattcatgaaggattcgccctcatgatccaatacctcccaccaagccccacctccagcactgggaattacatttcaacatgagatttcggtggggacaaatatccaaaccatatcagtcccactggaaaatccctaattaaataattacaagtttttggctacttctgattgtttgggcttaaattatgtttttctttaatacaggcatttgcaagaaaaatctgaagttaagttttgcttatgtttgcaatcaagcaaggtttaggtcacttaagaggcctaacttgttttgtctgctcagagattcttcaggcctgacctccactttaatttacttgaagagcatcgaatatgaatctgcagaatttcagtgaaactatagaggaagaatggaggtaaggggtgtgtgtgtgtgtgtatgtgtgtgtgtgcgcccacaagcacttgtgcatgctcttgtgtgtatatgttgtatgttatgtgaaacagtaaaatccttttttatctgtagaggaagtcaatgttcaatgcataagatgaaaacaccaagaaatagtaatgaagtcatgttattatagatatatggatgtaaatatcaaaagaatccattaaaatgaaagtgattgctttagaattagaaaatggcagagggaaaatggagagttgaggaactgctctctatcataagctttaaatctatcttcctgggcatggtgactcacgcctgtaatcccaaagttttgggaggctgaggcaggaggattgctgagccgggagtttgagactggccttggcagcatagtgagcccccatctctacaaaaaataataataaaaaaaaaaactagcaggacatggtggtgcatgcctgtagtcccagctacttgggaggctgggatggaaggattgtttgagcctgggacagtgaggctgcagtgaatcgggatcatgtcactgcactccagctctgggcaacagagagagaccctgcctcaaacaaacaaacaaacaagccaaaaatacccacaaacaatctaaccctaaactctgtggatttacaactttcattttaaaaaattttaataaaaggaagagatcaatggtcaaaattatagagtagtatagcagaatgagaattaactaaaaatcacttccagggaccagcaggctactatttggcaatggaacagttctgggttggtccaccctaagtgctagagtctgcctctattctaggtccctcctcagtacaggacaatttgtttcatgaaactaccaagttgctttgttactatatataaaaattattcagatttatcacgtcaccacccgctatgagaatttacgcaacaaacaccgagcgcttgcttctcaatgcctctttctaacgttgtgtctctatttcttgtaccatctccccccacccaccctgacacacattaaatctaatcagggtgttatctagatttcaatacaagtttgacaagtagacaagtatatgaataagagattaacacaaactcaaactgccccatgtgtcctgtcttcatggaaattagcttgtaaagtcaaatgagttggtttttctttttcttttctttctttctttctttcttttttttttttttttcggagacagggcccaggttggagtgcagtggtacaatcacagctcactgtagcctcgacctcctgggctcaagcaatcctcttgcctcagtctcccacgtagctgggaccacaggtgtgtgccaccatgcccagccaatttttgtatttttttatagagacggggtttcaccatgttgcccagactggtctcaaactcctgcactcaagtgatctgccagcctcagcctcccagtgagttgttttttctctttgttctcacatcatccctttctccttcttgcatatccctaagtttaagccccaggttatgccgcatctccttgatgaagtctttctgatcagggtcgggcttcccaaagataacttcttcgttctctctcaccctcttactgaaaggcaccaacagctcttcttagcaatgtactgagtgcctggcacttagtgttgtttactttattgttccaagctccatctgggggcaagctccccaactgagacattattagtactccctgcatctacgaaggacttcgttggaacttgtagatttggctcctgaaaccacacaaaataaaacaaaatcctgaacatgcctacataaatatgcacaaaaacacattcagttccactgaatggttatttgatgaaattgaaattatttttcattcttcaggcatgaccatcattttgtttaaatacagacttcttatcttttaaaggcatatactaaatatgtacatatgaaatggtataatgtttgggatttgcttcaaaataacttggtacttgaagagaactaggtggcagtgtaagtaaaatcagagggccaggaatttctgctttttgtggcccaaggatgggtaaatagaggtaatttgtgctatttcctctatttttaatttgttagaaatttgtataataaaatattaaatacataaatatatatttatatctaagatataattataatagatattaaatatacgtaagtacatatatatgcattcaattatggaataaagagtgtttgacctggccgggcgtggtggctcatgcctgtaatttcagcactttgggaggccgaggcaggtggatcacgaggtcaggagtttgaaaccagcccggccaacatggtgaaaccctgtctctactaaaaatacaaaaaattagccaggcatggtggctggcgcctgtaattccagctactcgggaggctgaagcgggagaatcacttgacctgggaggtggagtttgcggtgagccgagatcgcaccattgcactctaatcggggcgacaagagtgaaactccatctaaaaaaaaaaaagtgtttgactttaatgagttattacttcctggcttaaccccttttactttacagaaaagacataaaaaagtgaaattacttgtctaagttcacaataatggctgactgtgacaatgctgggcctagacttcagatctaatcattctaagtgtagtggactcggagatagctgagatagaggaggtggcgggggagaagtgctaactgctttattctctcatctgaaagctttaagtctgttaaaaatagaacttgcctagtcaaagtaatactctcagctattattattcaattataccttggtgtgaatgagtgtgacatccttttctgagaaataacccattaaagaaccacagaggagaaaagagtagaggctggagaaagtgcaggacttgaaagacaaggagtctaaccatacattttatctactcaaaatgtagagcagatgcaccagaaaatattaacagtggctatctctgggtgttaggataagagttgcttttgttttgttttagtttttttatattttccaagttttctgcctaatacacatattacttttatcattcattctttgttatctaacacagattttttttttttttttttttttttttgagacagagtcttcctcttgtcacccaggctggagtgcagtggcacaatctcagctcactgcaacctccacctcccaggttcaagcaatcctcctgctgggattacagatgcccacccccatgcctggctgttttttgtatttttagtagagatggggtttcgccatgttgcccaggctggtctggaacgcctgaccttatgatctgcccaccttgacctcccaaagtgctgggattacaggtgtgagccaccgtgcccaggttttgccccaacctttttggtaccagggaccagtttcacggaagacaatttttccatggatggggtgcggggggatggtttcagaataattcaagtgcattacgcttattgtgcactgatttctattattattacattgtgatagacaatgaaataattatacaactcaccataatgtagaatcagtaggaacctgagcttgttttcctgcaactaggtggtcccatctaggggtgaggggagacagtgacaggtcatcatgcattagattctcataaatagcagcaatctagatccctcgcatgcgcagttcacaatagcgttcatgcttctctgagaatctaatgctgcctctgatctgacaggaggtggagctgaggcagtaatgcgagtgatggggagcagctgtaaatacagatgaagcttggctcgcttgcctgctgctcagctcctgctgtgcgggctggttcctaacgagcaagaagaaacctggaggacactttggtttcatcaagcaacacttgccaccaggaaggcgttgagtgccaattccacacccaatacccccaggtagaggaagtcttgggccttggggtttgcagtctagtttcctggtagtgtctgtcatggggctgaagaccaagcttcgtcttcatgctagactttgcccatttggatatttcatatcttgagaggcaaagagagcttctgcaatgtttgaggccaaaattcaaagcagagccaggcccaggaatcccatcaagcaaggcctgttgcccattctgctacgattcagataacttttgagaatataaatggctccctgggccactgtcttaatctttctataccttggtgaggcttctgttaatggtagaatctagatgaaggatagtttgggccacttcgtaaatgtgggtagtgatcttattcagattagatgattttgttcagattaggatgccaaaagtctggaacaaggcaagaccagaaagtctggttaggcaagaggcaaatggtttaaaacagagaccttcacaatttggcaagcttttaaattacttggagtatgcaaaatacagttgcctggaccttacccgagacccacgggaaaacaacaacaacaacaacagggcaggttccatggatctgtgccgggctattcccccagagaaatcagggaaaattatagatgtccataattccagacagaattataggtccctgagcttggtttgctgagataacatgttgcttttctctctctctctctttttctctctctcaatgtctctcccttttcaaaagtagatgtcacctttctgatccaatgcttgattgctagctgggctgaaccagaagcatcacgtctagttagtctagatgtggatgcaattcagtaatcataaacattagagctagaatattgtaggtaattgatgtaaccaaatgaagaaccagagacccagagatgaaaagttccttgcccagatctgcaaactcacatccaggttgctccctgcctaccctcatctcttacaagccagcatccttttacagcagactgtgggccccaaagcacagctgtggacaagagggcactgtacattcaccccaaggtctcaaggccaccaggggcttggtcagcgtttgtggttgtggcacttcgcatttgcctctttgagggctcccaaaaacccacttcctggccgggcatggtggctcacgcctgtaatcccagcactttgggaggccaaggcaggcagatcacttgaggtcaggaattcaagaccagcctggccaacatggtgaaaccccatctctaccaaaaatgcaaaaattagccaggcatggtggtgggttcctgtagtcccagctactcgagaggctgaggcaggagaatcgcctgatcccaggaggtagaggttgcagtgagccgagatcacaccactgcactccagcctgagcgagagtgagactctgtctcaaaaaaaaaaaaagacaaaacccacttcctttcaccttagcaccctaatgagtaacaaggaagttcagagatgagttcctttgccccagcctctgcagcaatgtgttttgagagcgctgggctccctcgtggtgcagagaggggacatcatcttgcagtggactttcacagcagaccacacctaagaagcaaaaatccagtccatgtagagtgcatcctcaggctctaggggcccatggtcccctgttccttgcaccatcagatagtcccatgtgtgggtcgctggccttgtttctggtaccttgcagggagaccaggccaagtgtgaaaatccaccagggccctttgcaagcccaaattgaggattttgtggccgcattaaaatgcctttctccttctgaaaaaggattagatgcaacaaagtgcttgagccctcagcgcctgtgaaaagaagcccagtctcaagtgttaagctcggattccatgcagcctccggcaaaggcctcgtcaggaaacagccctgtgtggctgcagctgctcagattccagcgctagggttgatttgcaccagtcgcgggggtaggggtgggggcagaccagatgttttaaggagattattgcctgaaagcaaagccagttttcctgtgtgccacccacttcttttttttttttttttttttttttttgagacggagtctcgctctgtcgcccaggctggagtgcagtggcgggatctcggctcactgcaagctccgcctcccgggttcacgccattctcctgcctcagcctcccaagtagctgggactacaggcgcccgccactacgcccggctaattttttgtatttttagtagagacggggtttcaccgttttagccgggatggtctcgatctcctgacctcgtgatccgcccgccacccacttcttgaaggtgatttttttacatagtgccaccaaaactggtaggcgtggaaacaggagtttacatcttctgagagcgtccaacagcctcggcttcaggcgccttatcttatttaatcatgaccatattacctctgttctgggctgaattgtacccccaaaattcatatgttgaagccctaattccccattacctaggattgtaaccataacaggagatatggtttttaaaggggcaattaagttaaaatgaggtcatatgaggggaccctaatccaatatgattggtgtcattatgagaaaaaaaattaggacacacgcatacacagagggagtccatgtgacagcacaagaaggtggctgtctacacccaaggttagaggccttggaagaaaccagccctgctgacaccttcatctcaggtttctagcctccagaattgtgagaaaataaaatctgctgttgaagccacccagtccgtggtattttgttatgacagccttaacaaaatcatccaacctccattttacagatgggtaaaccaaggcttagccaagtgagttaactgacccaatggtatatagctctttttttttttttttttttttttttttttttgagatggagttttgctcttgttgcccaggctggagtgtaattgtgcaatctcagctcaccgcaacctctgcctcccgggttcaagcgattcccctgcctcagcctcccgagtagctgggataacaggcatgcgccaccttgcctggctaattttttattttttatttttactagagacagggtttctccatgttgctcaggctggtctagaactcccaacctcaggtgatccgcccgcctcggcctcccaaagagctgggattataggaatgagccaccgcgcccggccggtatgtagctcttgagtatcacgggcccaggtctgatttgtctgattccaaaactcttatgtttaaccccctcattaactgcctgaagaagggagccgggggacagaattctaacactccctgggcaagagtgaacacctaggctttatgatgcttttagtaagggggctgttagaccaatgtctcccaccgtactgttgtaacgtgggcaggcctgtctgggggcttccacagcacgatgtttgactggggacttgaaatggatttgtcacataaattgactgacaagtggttctcaaacctgtttgcaaattaaaatcttgggagcagctagaaaacaagagccatctttttgggcctagctaacagctgctgggaatggactcctgaaatctgcatttttggtagattctctgggtgagtctaatgcatagtcaagtttgagaaccaatttaggagagaaagcattcaaaggatatagtttcccagtgaggataattttcatatgggaaggaccatttatttaaaagaaattcacaggcagctcctcagtatttctgtcccccaggtaactggcatgacctatagtatgcagggggacatcaagaacccaaggcaacctctgctgatctttaacagaagcttcctgcagcttcgggtgccccccattccatagatggatccaccacagccccagtaactgatccatgtctccaaccagccaggcagcagacaggtcttccttaaagggtctcatgctgcagtttaatgctgtcctcagttgaagaacttcagtggggatgtaggacatgtttgctacaaccctcacggtatgttttcaggtgcattagcataattattaggtcataggccccagccctccaggtgagagcggcttggggcccagcttcttcagcccagttggctgattacatgcttagaattcagaaaactggcttgtttcttagggcactgacaaaataaaccccacagtgtcagggtgaaggaattctgttctgctgaagtcttttagattagaaagggcaacatcaggttccgattatagctacaagggatatttcctcattgggaactctgtcctatctgccttataggtttagacctccccatattagttatccattgctgtgtaattaaacaccctaaaacttatgggcttaaaacaacaacaaaccggctgggtgcagtggctcacacctgtaatcccagcactttgggaggccgaggcgggtggatcacaaggtcgggagatcgagactatcctggccaacatggtgaaaccccgtttctactaaaaatacaaaaattagtcaaacgtgatggcacatccttgtaatcccagctactcaggaggctgaggcaggagagtcgtttaaacccagaaagcggaggttgcagtgagcagagattggccactgcactccagcctggtgacagagtgagactctgtctcaaaacaacaacaacaacaaaccttattttatctcccagttccatgggtcacggattcaggagaagcttagctgggtggttctgactcagggtccctcttgaggttcatgtcgtgtgtcacctggggatgtagtcttctgaaagctagattggggctgcagggtctgcttccaaggaggcacactcacacacctggcaagttggtgctaattgttggtgggaaacctcaattcctccctcatgggctgttcacagcctgcttgaatggcctcacaacatggcagctggcttccctcttagatggtgatccaagagggagcaaggcagaagtcagaagtactttctttcttttttttttttttttgagatggagtctcgctgtgtcgcccaggctggaatgcagtgccgcaatcttggctcactgcaacctctgctaatctgtttttatattttcagttaatctaatgctaatttattatgataccactggcccaattaacagaacacattattccaatctgtggtgaaacctccaagatatgtgtcaaacgtatatatatatatatgtttaatgctacctttatggttgtgaacaaaatcactatttatattcaaatgttatttgcagagcctttactatgttccagaatgctctttcgtatattttcctattaaattttcaaaatcaccctataggctgagtatttcaatgtttgattcatttccctccatattcacctctagagaggctagaggactcaatcaaagtcacataaggggaagaaccagttagtgacagagtccatttccaccatttgaagccgcatttgtgacccttcaccagctgcttccttgagcttggtgaacacatggcctcgctgtcttctctgcgtcactgggactatcttctgtgatcactgaagatgatggttgtgaataatggtggcatcaggaaagtgcggtggcggccacttactgggagttactgggagcttactgtgtgccaggcatggtgctaaacccctgcttgtgttgtccacgtggcaggaattatcatcatttcacagattaacagacgtaggtgcaaaaggctaagccatttgcccaggtcacaaacaattgttggggctggaaatgaggcctcctgtgtgactcacatccatgcatttacctgccagctcctctccccagggctctgcttctgtaactctcagttggcaggtggagaccctccctaaatgattgatagccaggtttcctttgaaaagcctcctgatatggtttggctgtgtccccacccaaatctcatcttaaattgtagttctcataatccccatctgtcatgggatggaccaggtgggaggtaattgaatcatgggggctgtaaccctcatgctgttctcgcggtagtgagttctcccgagatctgatggttttataaggggcgtttccccccttgctcggcacttctccttgctgctgccgtgtgaagaaggatgtgtttgcttccccttccgccatgattgtaaatttcctgaggcctcagccccgtggaactgtgagtcaattaaacatctttcctttataaattacccagtctcaggtatttcttcatagcagcatgagaacggactaatagactttgctttccacacttgctgcagttcctcaaaacatcacgtaattgtttttatctgtgtcgactttgcaatgtttctcctaagcagttatattgcgttatcaggtgattgggtgaaaacccagtttgggggtcaaaataattttatttctctgcttgataaatgctatgttgtagtattaagtaataatggtagtgatttgtaggaatcaggagcatcagcagcaaaagcgaaaaaaaatcataggaaagtctacttcattcattaaaaatgcttacaatggagagaagttaatttcaccataacaatagtgtattcattgtctggggctgccataacaacgtaccatacagccatctcttggtttctgtgaaggattggtttcaggaccctcacaggacaccagaatcagaggaagctcaagtccctgatataaaatggcacagtatttgcatataacctgtgcacatcctcccatatattttaaattatctctagattacttataatacctaacgcaatgtaactgctatgcaaatagttgttatactgtattttaatttgtattattttttatggttgtattgttattttttatattctttcaaatatattcgacctgtggctggttgaatgcacagttgtggaaactgtagatgccatgctacaaattgtgtggcctaaaacacaaaaacttattatctgaaaactctggaggctagaagtctgaaatcaaggtgctttctttgaggcctctacgggaggaggctttcttatctctcctgctttctttgagggcctgcttcctttgaggtctctacggaggatgccttcttctctctcccagtttctggtggcctcggacctgctgtgacctgtggctgcatcacttcaatctctgcctccatcttcacacggctttctccttgtgtctctgtcttctcatggctgtcttcttatagaggcaccagacatgctggattagggcccaccctactccagcatgacctcacccgaattacatctgcagtggctctatttccaaataaggtcacatttgtctgaggtcctggaaattaggacttgaacatatcttttggtgggatacaattcaacccatggcaggtagtatcagggcttacccttaaatctaaaagctgatgctcaggacttatgcagcatttggtgttgatttgggataatttctaggagttgggatacatgggggactttggcctgatctcataaacattcaagaaggaaacaagaagaaatgaacggaaacatcctttgctttctgttcctctgggggcagacggggcaggtttggttggtgagaaatctggcataaatcttacaagcaaatgtgcatgagaaggagtcctgtgggacattttcttgtgcgcatacacctgggagatttgatgagcagggaatagcttatttttatggatgactttctggtaaccagatagaagatagacaccctgtgtctcctctgcaatgtttagttgcttctgtcaaagacacaaagtgacagctatgctcctggattctggagagagataaacaggacttggtcgcaaatggcaattcaaaatggaggaaggctcttcccagctgggcaaggagcatccactccacagcacagcctttggtagtcacctgcatccactcctaccactgccactttgttgtctacactccctagtggcaaacacttgtaccctccttatctcagcagtgtgatagccagcctccaagatggcccctagtaattctcacttccttgcattcacatcctgtatagtcccctcccatatacacagagctgacttgtgtaaccaataggatatttaaggaataatggtattgacttcagaggctagctcataaaagtacttctgatggccgggcatggtggctcacgcctgtaatcccagcactttgggagaccaaggcgggtggattgcttaagctcaggagtttgagaccagcctgggcaacatggtgaaacaccttctgtactaaaactacaaaagttagttgggtgtggtggcatgcacctgtggtcccagctacttgggaggctgagacttgagcccaggaggcagaggttgcagtgagccaagattgtgccactgcactttagcctgggcgatagagtaagaccctgtctctcacatgcacacacacacacacacacaattgtaaatgacatccaaaaatcaaaaagaactttgagtggtagtttcattttcattgaggggaaagtgcttttaaagtatgtatactggccaggcgcagtggctcatgcctgtaatcccagcactttgtgaggctgaggtgggtggatcacgaggtcaggagttcgagatcagcctgaccaacatggtgaaaccccgtctctactaaaaatacaaaaaaattagctgggcttggtggcacctgcctgtaatcccagctactcaggaggctgaggcagaagaattgcttgaagctgggaggcagaagttgcagtgagctgagatcacaccactgcactccagcctgggtgacagagtgagacttcgtctccaagaaaaaaaaaaaaaagtatgtatactgagagagagcacattaggtcaatcgatggcgtgattttacctcctagggaacataagggtacgtttgaccatatctgaaatatctttagctgtgacaaggtgaggggggtgctgctggcctctgttgggtggatgccagggacgctattaagcattctgcaaagcacgggacagcccccacaacagagagtggtcaggtcccaaatgtcagtggtgccaaggttgagaaactctgctttagagactagcccgactctgcctgtgtgcccagggaagtggggtcagagtctttttcctttttctcagaaccggtgtatgtgaggtatgggcaaggtcagtggaacaggaaaaagtcatcgtaaaagacacgcggtagtgaaatttgaggtcagaaagaatgccgaaaacagtgaggaagcaaaccaaaatttgagctcagaattgctacctctgttgtccttggaaagttgaaggatattaaactctgaaaatgagttacccgaaagaattcctccagctttctaaataaaggaattgcgcctttgctcaggcacctttgcaaccttaatgagctactgctgtcttacttgagaacaccagagggcgctcaagagaggaggaggcgactggcgactatcaaggtattcttgtatttgtctttacaccgccctggtcccgagggtgagaagaaagaagacagattcaactgtctctctttcatctcagcccctcattaaccaactttggttcctctgccattcttctactcaaagagcctcggcaaaacttcctgacactggagctaaataaaccttcgccacggggagaccggctcgccgaaagggctgaatcttgggtgtctttgtattctcagccccttggtgcttgagagggagattttgatttgaaaacaagccctggagagggatgctaagtgatctctcaaggcaaggcctatgattattgcctttggtagtgagtttagcgacacaataatggaaagtttgttggaccccaaatcaggctctaagaagtctcagttttgccgtaactacctaattaatgggactcagatgctcatctgtagacttaggtggactgcatggtaatttcctagggctgttgcaatgaagcactgcaaactgggtggcttcagcaacaaaaatatattgtcttggttctagaggctggaaatccaagatcaaggtgtctgcgcaattggttccatctgaagtcgctgtggtagaatctctttcattcctgtctcccaacttctggtggtttgctggcaatctttgccatttcttcacttatagatgcaacatcccaatctctacctttatcttcacgtggcattctccctgtgtatgtgtctgtctgttcaaatttccccttttcataaggacagcagccatattggatttgtgccaaccctgatgacctcatcttaagaccctgtttccaaataaggtcacattcacaggtactgagggttgggacttcaacgtcttttgcaggaacacaattcaacccataacaaatggcttctaaagtctctcctggtttcttgacattacagctatggagttttgagaacaggacttcctccacatggtgctaatgatgcatccagcctacacctccccggaggaaggggtagttgttttcagccagagaaaactgattccagcctgggcactggaaggttcaagttgattggtgacaattctttccgagaggcggttatcactgcttattgccaccctcagtggtttggaatcactttgttgctggttggagtaaatggaaaacatatttaacttaaaaagtgaaacatacaatgctatcatattgcacaagcaaacgtggagaggggcaggggggcaactactgtttcaagatgatttaagaatttgatcaaatgtctggctgcacaactgcgtgttttgaaagcacctcacagatgggttctataattgagaaatgcatttgttctttgtttggtacatttaaataatgtgattcaaagtttggagttgaatgcctttctgaaatgacttccctccatctcgcacacacacggtagtgtgttttcacagaacggcgtgcagtggggaaaggactgcatgcttttggaaagatgtagcgcacatccatgagaaaatatgtcaaagaatttgcaaacagacacagaaaagtaataaccaaaaataagcatctgtgaagccttgctttgtgtttagaaaagataggccaggcatagtggcgcacacctgtaatcccaggtggctcacacctgtaatcccagggtttttccagaaaaaccctcagcacctttttgtatctaggtcttccaagaaagaaaacattaggaccaggtgctgtggctcacacttataatcccagcactttgggaggccaaggcaggtggatcacttgaccccaggagtttgagaccagcctgggcaacatagtgaaaccccgtttctataaaaaatacaaaaattagctgggcatggtggcatgctctgtagtcccagctactagggaggctgaggtgtgtggatcagttgaggccaggcattcgagagcagtctggccaacatgctgaaaccctggctctactaaaaatgcaaaaattagccaggcatggtggcacacgcctgtagtctcagctacttgggtgactgagagatgagaagcacttgaacctcggaagtggaggctgcagagagccaagatcacaccactgcacttcagcctggatgacagagtgagactttgtctcaaaaaaacaaaaacaatacagaaaaaaatagccacagagaattaaagacatggcatatttttaagagcgaagcacctcacagaaactgagaactcacaggacttaatagggcgaggcatttcagtgttctgagaacaccgtagagcaaacttctccagtaagtattccttccttagcatttctggagtccatagtactcgaaaagcttgatagaatattcagtatcactagctaccagtgaaaataaacaacttactttaaaaaggacgaagtgagcatttccaagtgtcaggtgattagagcttcctagtgttccctggaaagtggggcatttcccaaagcccactcgctctgatcctgtcctcttggatggctttggacactaggacatcatatggcttttcaacattccaggattcctgactttgggggcagaatcctgcccagtgttttcttttcttttcttttcttttcttttcttttcttttcttttaagatagggtcttgctctgttgctcaggctggagtgcagtggtgtgatcatggctcactgcagccttgaccttctaggctcaagtgattctcccacctcagcctccctagtagctgggactacagagcatgccaccatgcccggctaatttttgtattttttgtagaaacggggtttcactatgttgcccaggctggtctcaaactcctgggctcaagtgatccacctgccttggcctcccaaagtgctgggattacaagtgtgagccacagcacctggtcctgatgttttctttcttggaagacctagatacaaaaaggtgctgagggtttttctggaatggggaacacatgggttctggttttcatatacctttgtgtggtctgaacaggttcctccaatcataatatgcaaatatatatgatcctaatgggctcttcccaaaccctttccagctccaagacacagagcttgattaccacttggttacagactcacaggaggatacacagaaaactgaatggacactgctgactctaatgatctgcagcggaggctcttaacctccaatgagccgtagagtcacctggagggctcattaacacacagactgcagggtcctgctccagagttcccaagtcagattcagcgggtctggggtgggcctcagaatttgcatgtttaacaagatcccaggcgatactgacgctgctggccagggaaccacactcagagacccccagggttccagtaataaggaacatagagaatgctccctaggtacctggcaccaaggtttcaccagagtcaccaagacacactaagactgactggcctgagctttcccgcccctaaaagcaaggctgatgtgcaggaatgcagggaaaggactcaatgacaggctactgtatctggatgactgaaaaacagacaccttcacccctggccaatctcaagctggctcagcatttgtttaggagagtttagaagactttagcagagccagagcccccaggaggggccgtgactcatgtgtcaaacatcatcaggagactgggcaccatggctcatgcctgtaatcccagcactttgggaggccaggatggtgagattgcttgagttcaggagttcaagaccacccagggcaacatggccagaccctgtcttgacaaaaaatacaaaaattggccaggcatggtggtgcgtgcctgtaatctcagctactcgggggccaatgtagggggatcacttgagcccaggaggttgaggctgcagtgagctgtggttgcaccactgcgctccagccagggcaacacagcaagaccctgtcttacaacacaacacaacacaacacaacaaaaaacccacatcatcagggagcaagacaggggtctcaagggtggtggcaggtcagaatgtcacaggccgcatcagcacattcattgcaggctaagcagtgagaacatggagactgtggtcatctaaccttccttccaaaaggggttttcaaatattgtttgagtggcagacaaagatatgaaaaacattgaggcagagcttctctggttgaagtgagaagagggtgggcaaggggtctggaggcaggacaggatggggagaaggatacctctggcatcccccttgcgtggcctttctcttgatctggtgcacctgcaggacctccatggaaccccaggattcctcagaacacagttggaaaaccattgaatggacctctcccttctccctcattcacgcatccaccaaaggctttctgagctcctctgtggaggaaacctctgaggtgctacaaaacacagatactcccagcacactttctgacttccacagagtagaaactatcagaaaagattagatcatagttttattggagaattgctgggcaatgcaacaaaatgagtatgcctggggttatgaataccatgaatacctggggttatgaataccaagagctattcatggttataggtgggtttacctagtcatggtagccttacctgagacctggagacttaaccagacagtggtaatgtcaggctctggctctggggggaggttagtgtgagtgtgtgtgtatgtgtctgtgtgtgtgtgcacatgtgcacgctaatggtagttctttcaggcaactggacgtctctgcacatagcaggcgctcaagggatatggactttgactgcttccattgcctactcatgagaccaccctgttctattacaggaaggtggaatagtctcatggtttagaacatggactttggagccacgctgctgaagttcacaaccagcctgggtgaacttgggcacgtgactgaacctctctgttctggttccctgacccataaaaatgggagtgatgatagcacttgcttcacagagttgttgagaagtttgcattaatcaacatctctaaagcacttaggaaaggccttgctgtatgacaaggaccatcatttgatatgtggttataagaggttttttaatacttggacattttactctcaataaatatttgatttttatttttaggaggcaagactgggaaagcattagaagctagctgcttggaggcctaaatcctctaacttctctcaaaatttcttaaatttttaaaatatatcagctggtaccttcaaggccagatgtgaaagttattttatgatgggagcatcagctatctggtgtaagagctgaatagctcttaagagaagcaaacagggttggaatccaagactgacccctgatctcaagttttctacttcccccacctctttgtcataactcaagaattagtggagaaaagaaaagcatccttcataagctatgattattagaacagcaaagccaagaacagtggccatttaatgagcacatactacgtgctctaggccatgctcagtactttacgtaggttctatcctaggctgggtttcccaggagccccagagacaaagttcatgtgcaagtcatttatgaaagataagctcccagggaaaagaggtgagtgagtgaagaagcaggacacggagagggaggaaaccgagcaaatgtatgatctcaggcaaaatcgctccaaggcaactgtcacctgatcctgcaggggacagtggagtgtaaattaccccagagttatgcccagtagaagcaaggaagctgggcttttcttacttgcatgccatcagttagaggatcaggcccaccttgggggaatacaaattcccaggcacttccagctccacatctttgagtaaagtggggctccagtagaccaagggaagccacaggtgctggctgtaggtatgggaagcaaaacgaatctcaagaagaagagtgcaaaaaaatgagaaaaaggggtccaaggagatctcaaaggagaaggagtgaagaagcccagtccttccacataagtgtgacttggctccaaagagaaaatctggaagccatgatcttggcttccatcagctatcatcaacaaatcgcaggggaggccatgtggcccatggttgtgagtcatccctcgagtaagattcaaatcctcctgctccattcactgactgtgtgaacttggtgatctcattgacctcattttctgtatctgtaaaattgagacaataatagaacttgtatcaaagtgagttgttctagctaggtgtggtggcacacaccttagtcccaggtactcaggaggctgaggtgggaggatggcttgagcccaagtgttcaaggttaaggtgagccatgatcatgccactgcactccagcctgggcaacagagcaagatcctgtctccaaacaaaagggagagttgttttgagaattaaataagttacaacatgtaaagctcttggggcatcagctggcacatagttgtgctcaataaatgacaactgtgacagtgtggatgcagtgtggttacaccaggaatatgtacagtgagacaggtattggtcaggacacagtgggagcaggagctaggtaagcagaaaggggctggtggagtgtgtgagtctgggcaggaaacagattagagtccagagaagcccaatcaaggcaggaagccttgggcatcaaccagagactgagccaggcaggctgagacaagaccctggagaccaggcagttaataagaggctttgagagcagggttgaaaaccccagatcatgggtagaggttctttgctttggggctgatttcattttggctgctgggtcaattctgtttccctttttaaaaaatctttgttgagacataatttgcatgccataaaatttactcatttaaaatatgcaattcaatggggttagtatattcagagttgggcacctatcaccacaatccaagttgagaatattttcatcacccccgcaaaaactgcatacccattagcaatcactacccatttccccttcccaccagcacctggcaaccactaatctattttctgtctccatagatttgcctgttctggacatctcatatcaatggaatcacataatatgtggtgttttgtgactgacttcttacacgtagcataatgtgttcaaggcttatccatgtcatagcatgtatcagttctacattccttttcatggctgaataatatttcattgtatggatataccccttttatttctccatttattaggtgatggacatttgggtttcttccattttttagctattatgaataatactgctatgaacatccatgtactagttttagtttggacatatgttttcattcttcttggatatatactgaggaatgtgattactgggtcttaaggaacctttatttttaagcttttgaggagctgccaaactgttttctgaagcagctgccccattttacatttccaccaggagactacgagggtttctatttctcctcatcctcaccaacccttgtaattatctgtggttttgattctagcccatcctggcaagtgtgaggtggtaactcactgtaattttgatttgcatttccctaagggctaataatattgaacatcttttcatgtatttattggctatgtgtttttcttctttggagaatgtctacttaaaggctttatccatttctaattgacttatttgtctttttcttattgagttgtaagagttctttatatattctggataccagttctttctcacataacatgatttgccaacattctctcctattctgtgggtcatcttttcactttcttgatagtgcagcacaaaaatctaagttgaggtagtccactttatctattttgtccttggtctattcctttggtgtcatgtctaagaaatcattgcctaatccaaggttaaggatttttaagacttttatagtcttggctcttatatttagcactctagtcctttttgaattaaattttgtgtatggtgtgatggagggggtccaatttcattcttttgcatgtggatatccttcgtcccaacaccatttgttaatgtctgtttcagaggtatgtgaaccagagcaactccatcttgaatgggagctgggtaaaatgaggctgagacctactgggctgcattcctagatgtttaacgcattctaagtcacaggatgagataagaggttggcataagatacaggtcataaataccttgctgataaaacaggttgtaataaagaagctgacccaaaccaaacaggttgtaataaagaagctgacaaaagtgacctctagtcgtcctcactgctacactcccaccagtgccatggcagtttgcaaatgccatggaaatgttaggaagttacccttatggtctaaaaagggaaggcatgaataatccacctcttgttcatcatatcatcaagaaataaccataaaaatgggcaaccagcagcccttggagctgctctgtctgtggaggaggcattctttattcctttactttcttaataaacttgctttcactttattctatggattcaccctgaattctttcttgcgtgagatccaagaaccctctcttggggtctggatcagaactccttttgggtaacatctagatgacctcacagggggtggcatcagtgtgctccctgccacctctgctggacattaacagctaggacttacagagacttgaagctcccatttattcagtgttttctacacatttctctacaccagtccaggccttgctttaattgtattagaaaacataaaattgaaagcaaaactcctaaattttcgttttgcaaaagaaaattatttaagctcaaataattccccatttggcatttagttttgagatcctctagcctttgttattatttatttatttttgtcccaatgcagctgaaatatttctccttctctatctctggggcctgtttaaccaggtgaagagtccacacaaagctacaaaaatcagttgaaaataaaaaaaaattagtggagaattagttttccttgtctatctgataaatgtccctagacttgtttgagtggctttgcatcaaacagcaattagcatgaaaggacagcatgactgggtggtttggcttcctgcagacgcagctttgctcacaagagcttactgatccttgtcaccaccctcctctggggcagggccaggccagcttgtcacgtgggactggtgacatcttctcacttggcttttccagtggagtctctagaaacaaatattttagaactttcatccggactaggcaggattaagtgagaatctctttagcatctgcctttgttagaattaggttcatctgtctgaaagcaaggcctcaaataaaagtggcttgaaaatgacccaagtttatttctgtctcatgtgcccagggttggtgggatggctctgctccataggtcctgaggggctgctctacctccttagcacagcttcttatagcaccagaggtccagccatcacgtctgcattccagtcagcaggaagaaaggagagcaaagaagggaatgtcccttcccttacagtatgctttctggaagttgtataccacttctaccttcagcctttggctaggacttagtctcaaggacacacttagctggaagcaatactgcaaaatgcagtgttgttattccacgtggacctgtgcccaggtataaactggggcctctactgcaaaggaagcagaacagaattgacattgggtggggcgggcagaggggggttactgtctagactctgccagagtccaagggcactctgtcccaagagtcaagggaccttttcctaatttcaattctgcaaatgatttgtcagcccggttgaggagcaggctaggacagcatgcacagatgccgtcttgctcaacttaacccttcttcatttgtgcattttcatttaatacacttggatttggtacagagaaggggaatagggttctagacactgaaggaaatgaaatccccacatggctcagagcgtggggattttgctacttgaaataccattgtaccctctccactttcaaatgaagatcctgacattgttttccagaacaattgcaccgtccagactcagggacccacaaaagtgtcaattcaccgcatgttggcttttttttttttttttttttaaactaattgtaacaagtggttgctgtgaaacgcaggcttccgaaggctgcccttccagtgacccataccctgacctggacagaccaccttctgtccaaaagaggaaaagttttgttcttagatcagatgaaaccctggcttacccctggtgaccagcgggattaatcagacaccagtaaaacagctgacagaaacactgaaccaactcacaataaccagcacacacatcaggcagcattcctctgcggggtcttacctcatccctttcttttgccctgagatgcaatccctgcttcctgaggccgtgttctctgtgcttcttaaagggagccacttgcaagctaagaagctgcccatttttaggatcaatatggtattcccccaagttggttagaaaacacaatggcagggacagaatttgcagcaggggtttgtagaggattagggctgcttcgccaggatttatcgccccatgcacaacccagactgaaaccctggtcgcagtctgggtggtttagaatgagccaacaggcattgccatcagttttaggcctttgaaaagtaaaatcttcccaacgtgcaaaaagtaaccactaaaaatggaccataaccagatgcaaagaaagaatgaaagattgtgaaaggaaaaaaaaattctgaaactgtatttggaaggttcctgcagaaggggtccttctgaaagtatgcagcaggcttcatagcttgcccaacagtcatgtacatttcagaatgtaactttccaaagcaagttgcttctttgctttactacctgcagagagccacctgcttcatttaatcgtgctttgggttctgttttatttttactgtatcccattttccagggcaaaaagcagaaagcaaataaaaccacatttttgctactaacttaatatgaaatctattttaattcagaatgatttccctccacttttattttaaaacatgtttaagaagaaaagcaagcttagaggatttctggtcctaaatacagcgatttcaaggattgttatcaaaaccctgaagggcagtgttaaagaatgggataaccttgaaatataggatggctaagaagtgagagcaaaatatcactcactagtggctatttgtaaccagagttatgccagggaagggagaaagcagtgagagccggcaatatttgagacggaaagagatgacagagaaaggtatctttagcgaggaaagcatttagtgactttaaatcagatgccaaaagaatatttactgggggaaaaatcaatttttctgtgctgtggaggaagcatttcaaagtaagacaacctttatttccaaatgccttctggaggccctccccggaggacacaacaccaacgctattaatcttgacttagtgaatgaacgtattatacggatttcaatccagatcttcaagtcttaaagagttctgaagagcccagataaagcaacccgtttttcctttggtgattcctcaggggtaactcactttaattcccctttcatctctatgggaggactcggaactttaaaagcaaacaggtttcctatactaattcctggagagaaggcttctgttgctttcttgctgctgcgagactgaaggtgggtgaccatcttcatttgttaccttggaagatgtggagaaccagaagtaagtttgaaataataggccaacggtagctgtctcctttcttcgaggaaagttattgcccttccaaatgccagtttgttttttgattttccacggtccagccccgtatttaacacagaaagatgctttagaagccagaacactgataataaccccaaatatacacaaagacaaagcagagggcatgcctgttttgtcccgtcagacaaattatgatctaaattttctgccaacaccactttttttcccctgattgtttatggcaacagcagcctgtttattgagattctaaactgcaatgaaattttctgggattgaaaaaaagagaataagagagttagagagagagagaaggcttattatgtagaagtaaactgtttcaaatggaaacctgactcccattgtggaaagggaaagcattgaggaaaattacgccagattatctaggctaaaggaaaaattttatgcctcactgtgccacttgcaaggaacaggagaggaaagaaaacacagaaactgtgtggcaacaaatgactaaattgggacgcagagatagcagccttgctaggttcagtccaacttgtacaagaatggtaacaacctaaggcagagatataccaacaattatctgttacccagggattatattaataaaacagccagggagggaaatggctccatttaactaacttttttttttttttttttttttgggggggagttggagtcttgttctgttgcccaggctggagtgcagtggcgcaatctcggctcactgcaacctctgcctcctgggttgaagcaattctcctgcctcagcctcccgggtagctgggattacaggcacccgccactgcacccggctaatttttgtatttttagcagagatggggtttcactatcttgtccaggctggtctggaactcctgacctcatgatccaaccatcttggcctcccaaagtgctgggattacaagggtgagccaacgcacccagctactacattttgacataaagtccgaagacgggacacaggtcagcacttttcatcctaaagggttatcaaaagacatcaacttgtataaaaactggtgtgaaaatcgagtgatgttttagttgatgtcatatgttttgttctctcatgtgtccagatcccggaataggctgagaaaaatagaacctggagtgtaaaaagaaaaaagaaacatgttagtggatataggacattttgcagctctcaatttgatctgttccacagtcgtcacacaggatgagaagattgtaggaatgtggaaaaaattagaataaccttgcatttcgagttatggaaaagaaacttttaagcttttaacatttctgtgagaacaacatgaacctgacagctaaatcactgaaatattgatcacattacaaataaaaattcaaacaaattcgtttcaattgaaagaggaaaaacattgatactactactgctcattggtatggtgatatgcaaatgtggactccaataaaggaatttgtctaatttttggaccacaattatgtgagggaatatcaaaatgtttataatttgcaacaacacaaggatgtagattttgtctgattttgttaatctctgaaaggcttatttttgatgtgaattaattggatagtctaatatgctccctttcagcccaccataaatatctgtgaattaaattatgtaaacagtttcctcaaaagcagaagcattgctaactcccttcccccgcattaaatagttctatatgagttgacagaaggagttggctgtgtgacctttcgcaatgaacggggaacatagccccctctggcctgaatctgagagaagccccttcccaaagcccttatgagatgatataccagaaaacaacacatctgaccaagaagtctctgaagttgcagccttttgtatttacacttttgagctatctccattgtgatgcaaatctcgattttcaatcaaaattggctagaaaaaaaaatctttctctggaaaccgttgtaggaagcacgtaagcctaaatcttaaattttctctgttctgacttcctattaagccacaaaacaaatgttatcaaacacatacaccttttgcaactgcggattgaaaactcaaccgtgtcaactagcatttttaactaactatagttttagtcttaaagggtgctgagtttatgcgttataaatgaacacccccctccctttttttttctctctaatttgggtgctcacgtcaaaagcatctaaaagcattttaacttttgtcgactgtcccaattcaagtttgtttgagagagtcctcccttcttagcttggatcctttatataagtccagatgaataaaataaaatgaaatgcaaaaggaaggcatcattaatggcttgaaggcgtcccacttttattttcttgtattttaagagctgaagttggaaatatggaatcctcccaagccgctcagaaagtttgaagacacagggggcagggacccagacttatggaagtctccgcctcaggctgaaggtttgtgggcgtctgtgtgtgcgtgcgtctgtcttttactgtacccttcaagatcgagttctgaaggagcatttctcctgccaaaatacacacacagcctgggattaaaagggctgaaacctaccagcaagttcttaacgccctcccacaatcattagaccaaatccaccatcattccagattcatttttcccttattcatctgtccaactaattcctgccacattcaccaggcttatatcttaatcttttctgttacatagagaatacataatgaaaagctgcattttctgggtacatgcacacatttggagcggatgaaccatatgtgaagcgacatacaatgctgaatgccggctgaatggcgtccagcgctaaaaacaccgcgagcgcaggaacaaaaagccggcgaacaagagccagcgccaggcttgcctctgctggaacaccaggggcttcgccgcgaaaacatgggtataatttcactgttttcactcacacaagctgtgggaaaggagtcaccatctgatgtttgattgtgtgggatatgtttttggcagtggccttgtattcctcattgacaaaaaaaaagaaaagaaagaaagaaacaagagaaaaggggcagagatggaggggggaggaaaataaaaaagaatagagctacatttgctgttttcaatttgcagtctgggggacaggcacagctgacagttctgaccagtggccacctgaaaatcagggccagggcctggggactgtcccctctgcctccatcccctgggcctccctttatgccgagggaccaggaggggacttttctccatcctcccccgtcggctggttaacttacgactgagctgtggggctgacgtttgcctgatttaataaagccttttatccaaggtagcggctgggaaggcagggtcctgacagcccagagggggaaagggcccaaggctcacaagcagacactttccggagccggtgaggaaaagagtgaagcttcaaaaaaactccctggcaatgcgtctggggctgaagccaggtggtttctcccgtggtttctggctggagactggcaggggtgttaggtttacaccctgggtctctgccccaaccgaaggttctagaaagagatatgctgctctttgtcaccatcttttcctcactcaggaatgccagatttagcaagtaaacatacaggatgcccagctacatttggatttcagaacaacaagtactaagccgtgatgtgctgtttccccaaaagccaattttcactgagtgtcttgcacgttatctgacaatgctactcccacgccaccaggcttcctggtccagccacccacctcccctcacctgtggcgggtgggcaggggggcggtgatcaacagcctcctctgcctgcatctcaggatgttaagaggataatgagagaatagatgggtagctgctttccagaaaggtcattaattagccctgctggttagcatgtggttccagtgccccagctgtgctaaaggccttcctcttagcatccagttcaaaccaggagacatgaccaatgagactagagagagtttggtgtcatttcctcctggtgcccagagccccttctctgatgggtttcacataattttgtttcgaccctcttttagaatcaaaccaggctgggtgcagtgactcacccctataatcccagtactttgggaggccaagacaggaggattgctcgaggccagcagttcaagaccagcctgggcaacatagtgaaaccccatctctacaaaaaacttaaaaattatctgggtgtgatggtgcatgcctgtagtcccaactacttgggaggctgaagtgggagggctgcttgagcccaaaagttcaaggttatagtgagccatgattgtgccactgtactactccagcatgggtgacagaatgagacctgtctccaaaaagataacaataaattgaaataaaactccccagttcagcacctcttgcttttactagaggcaaatatagtgtttaatggaagatgtggggagaaagccacatcctttctaatcaagtgctcctactcccggggatattggattgctacctttgagtacagtgcttgctaagaagctggtaacacctagttggcctccaggatttgtcttgaggtgggcaccttgccttgagttccccatttgtaggcctgtgaagcatatctggttaaaggcagagagaaagaaaaggtttccctttgtgagtagcaggcaagtgaccaggacaaatcgcattggcagccagagccagggtctgtgctgtcatttatcctccaggtggggaggtgggatcaggcaccggctttaaaaggaggtggtgttctgcaccaaccgggtccaagccctaaagagaagatgtcaaaggagcactgctcttttgaatattcccttcactggaagacagtcgtggctgcatatattggccgggactagaagtgtggttttccccatgtggcggaattgctttcattttcaaacatgggccaggggcataatggccgcttgtaatgatcacattagcatcatggagcaatatatctacaataaattaagactgctttgcaattagtaccgatgatcacagctgcggagacaaatggcatatgtgctaattaaataatttgtcacttcactgttaaacaaacaattcagcctctttatattacaaactgccatctccagaacatcaccatgggccattaaccccgtggaaggaacagcttgccatgcccacaattggtggggagcgatgtttgaatggcaggaaaaaggtgatggggaaaaatccacttggatgacaagtcccctcagactttgaaaattttcttggaaaatgagttccaggaggacaaaacaaactctgccactccactcagaaaacatttggaagatagcccactccagtgttaagatttctgagctctattcgatgtgcccttattgaagtgaaccatcaaactggttgcaaccaataaaaactccatcacgtcaaatctcaacttcatctggtgacttcagcgaaagtccctcctccccatttgtacagtttttcttttgtacagattttgtacatacctttgtacagtttttcttttctttctttaagttttagcatttcctaccccaaatgctaatccataaagctgaattgtgaactagggtttaatgggggccagccattgctagcctatataatggctttgtgtgaactaagaggactcagctctgtgcagggcaccagtcttggtaagcaaggtgcaggctggatttgcgtccctgctcaccgccttggtccagggcccttgtgcagtgaacaacctgtccaaccacacaggcagctctgactcacttgcctctgaaaccaggagagacctgggtaatttaaagccacagaacactagcaagtcatgtgtcattattatcctttattccttgctcttttatcagagttgttaactaatggaacttgatttctccttcttattcctgcgctcgctcccatacaagaggcagaatggtcagacagagagagaaaggcaaggcagtgaggacttcttgtcattggcccttcagcaaatccctcatcaggcaccgcctttgtaaggagcatgtgacacgggtggtgttgagtagaaggcatttgtgatgtaacaggtgtttggtgtaaaatactcaggcagtgttaagttccaccaaagtcattctactgcagtaaatttctaccaggcaggaaacagctagaaacaaggttgagtgttcagtcttccttcctgcaggaaaggtgattccctggataatttcacattaggctttaagagctcctttcctgtggcattgtgggggtggaaaaagaaaagccagtcttttatctttatggaaatctcactgttcggatacaaaagtctgtaatagaggtgagttcctcagcaaattggtgcgttactcaccaaaaagccattctgtctcttttttaaagtgaaatctgagtttatcccagaaagactggggcatggagcagcttagctcacatcacttaggataaaggtgggcacactcttaagtgagacagagtctcactctgtcacccaggctggagtgcggtggtgcaataatggctcactgcagcttcgaactccttggctcaagtgatcctcccacctcagcttctggagtagctgggaccacaggcatgcaccagcatacccagctaattttttattttttggtagagacaaggtctcactatgttgcccaagctggtctcaaactcctgggctcaagcattcctcccacctcagcctcccaaagtgttgggattacaggtttgagccactgtgcccagccttgctattattatcataactgaattttatagcatggagtgtcttcagcagcacttgttaatattgtctgttaggtgtgtgcagagtgaggaaaggagattgcctaagagtaatgtttctaaaagaacttttctgacatgtatttgtacatgaggaaatgcagagagtgcagggtgagtttagaggcactgaaagcactgccaggacataagatgtttttcctacggctctacaagatgcattattatctggcctgtttcggaaaagacaggctgttttctagcagcctcctgtcttctggtacttcagagagtggatttccatgtgtccaaaggctgagatgcgagtcaggaaccacccagaccagccaactgtcctaccagtgggcatagaatccttaggctgcaagacaacctagatgccagctcatctaagcctcttatttcaccagaagaaggaatgggaggagagagagacaacaatgaccctaaatcatcctgttcttttccttctctggtggcggtgggaggggaggggttcctcccaccttccctctattttctgatctaagctgaggaaatccaaatggtattcttttatcccaatattaactgggactcagagactccccaagccacttacttaatttgtggtgtaaaatatttttgttatagaattgttccgcctcttaaaggagatccgtggggaaagacctggctggacagccttttacatagccccagtgaaaacaatgcaggaatctgaaaaggtcattaggaaaataaaaacttaaagtcctgaaaagctttctgacaattgtccaaggccatgcagtcctgaggacacagaggacaccagccatccctcagccacgacccacgagccaacccaatcagaccacatcttgtctttcaggaaaatgcactgaattttgtaccatgcccccaaaagcctggatcaaattaagagttttaatactcaaagtcatttatattgtgtctctaaagcatatacaataaatgtacgcatcactcaggatatattaaaatgttttgccatacatttctaaaatcttaacaaatatcatgaacactttaaaatactacttttattttgatcaaaatgcattccatcatttgaaaatcaagtagtaattggatagattctaataaataaacacagttctctgctcagcttcttctgacatctttcatacccttgaaacaacacatttcaactctgtaatttaattttttttctggaatttcctttcatatttctagatgatatgtttctagatttcctgaattgtattttccaataccattattaaaagtgttttttaaattaagctattctattttaattttcaataattttggttctctgatccattttgatatcctcctcttcttgtttcatgagctaatctcttgctatttttgaaaaggccatagtttttaaaaatacgtttgcttgttgaaacgtttactgagttgtctctgtctcttctgggttcatttttgtttggttggttttgtctttatctttcttcttggagcttacttcaaatgtgattttggcagtcagttcataagagggaggtactgggtagctaattctatctgggcatggagcttcactctagagagatcaatgggaaagcagtggtgaaagcttaccagcagagtatcacaacctgatacagctacataattattattttactgtgtgtctcctcctggtcttgtatgtgtaagttccattaatgcaaagtttgttcattttgttcactgctccagtctcagtgactagaacagtgtctggcacataataaatgcttaaaaaacacttagatgaacaaagaactgtgggagaaaaatgctatacagagcacaaagtgagtgggagactaagagtaaggaaagttaattttgccttggagcaatggggaagttttttttcactgcattgactaggagcattcctataatgccaagacactgcctaggagtcttccgtgcattctttcattcatgcagccaacaacatccattgagcacctacggtgtgctgtgaagcagtgtagcatggtggtgaaggacatgggaattgattaaggaacctgaagtctagccctggctgtgtgtctttgggcaagttatttacctctctgagcctcagttcccttaattctatatgaataattatcagagtgtctgcttatagggttgccttaaggattaaatgaattgctgtatgtaaagagttcaaatattatgctaggctatgttaggctatggagacacctgtgttaggctatggagacacctgtgttaggctatggagacactgagatggctagaaatgatcttttccatcccccaacaagaagacttcatagtcgagtaggctgcctttctcgttcttgtacactatccctcgaaattttttaaaaaatcagaaagtgcaccgggcacggtggctcacgcttgtaatcccagcattttgggaggctaaggtggaaggatcacctgaggttaggagttcgagaccagcctggccaatgtggtaaaaccccatctctactaaaaatgcaaaaattagctgggcatgggggtgggcgcctgtaatcccagctactcaggaggctgaggtaggagaattgcttgaatctgggagatagagtttgcagtgagccgaggtcatgccactgcactccagcctgggcaacagagcgagactccatctcaaaaaataaagaaacctagaaagtgcaaagtatgtccataggcaatcaaaatgatgcttgaatttggggtgggggaaggggcaagatctcatgtcaaactggattactatcacctcgacaggcacaggactggcagagttaaaggaaaataacaagtcaacagcctcttccccaggggctcagtaatgtccccagcctttggctctggtgtgctttgtgcaaagggctaaaaatagcagaggcgtgctcaggattaagatggcctttcaatcacaagtcagggaagtagtgattttccttagacaaaccctgttgctactggtgggggtggggatggaggtcgggagacatacgactttctcatacatttgattaaaactttggcaaagttaagaatcttcatagtctctaaatctccatttgcacccaccctgacctttcttaagtatagtttcattgattttttaaggctatctttgaagctagaatgctgaataactctaaaacttaacaaaaagtccactcttttggttgcctgtttgtgtgataatacatcctcttaaaaaacacagcccattttaatttgcatccatccacccttcacctcaccatctatagcaccataaatacattcatcaaagaaggcagcataaaaagtagtaagcgtggagaatggtgaagtgtcagttacaattaatagctttggaaataaaagggataatattgtgtctcatttacaagttttgaatttaatttcacaacttaccatttgaaataaattaatgccagaattgacctgttatgaagtctgtttgtaaataaaattggcccaatttagtcaggggtggggagtgcatcttagtcccagctactctactgaggaggctgaagtgggaggatggcttgaagccaggaattggaggctgcagtgagctatgatcatgccacggcactccagcctgggtgacagagggagatcctgtctctataaataaataaataaataaaatcagctcaactatttatgtcagtgtcgtaaatacagaaaccaaatccttaagatgccctagaagtggaggttgggtgggagggaatatcctccccaaacttcaaatcacatccatgctctgagagctccattgggttgccaagctccattcagtctcattttcctcttaacaatgcacgtgcgcaaaggcttcctgcctgggaaggcaccaggcatctttttaaagaagtgcaaggattttagatgaggtcaggagttgggcatgggagcgaggtgaagggtgaaaaaagttaagctactctggtgtaaaccaccacaaactccctgttcctgcttttattccttccctaaaacgttttcactttgggagaagaaaattttaacaaatcattattattaataaaaagctgtaaagtgggctgcacatggtgctcatgcctgtaatcccagcattttgggaggccaaggcaggaggatatcttgagcccaggagttcaagaccagcctgggcaacatagtgagacctcgtctctacaaaaacaaacaaaattagccaggtgtcctggctcgcactactccagaggttgaggcgggaggattgcttgatcccagcaggtcaaggctgcattgagctgtgatcacaccacttcactacagcctgagcaacaaagggaggactctgtcttcccaaaaaaaaaaaaaaaaaaggaggaaaatggcagggtgggagggggtggggagggggtgaaatcacccataacgtcagaggcaggtgaaccagagcaactccatcttgaataggagctgggtaaaataaggctgagacctactgggctgcattcccagatggttaggcattctaacttacaggatgagataggaggtcagcacaagatacaggtcataaagatcttgctgataagacagtttgcagtaaagaagccggctaaaacccaccaaaaccaagatggtgacaagagtgatctctaattgtcctcactgctacactcccaccagggccatgacagtttacaaatgccatggcaatgtcaggaagttacgctatatggtctaaaaggagaggcatgaataatccaccccttgtttatcatatcatcaagaaataaccataaaatgggcaacagcagccctccgggctgctctgtctatggagtagccattcttttattccttcactttcctaataaacttgctttcactttagtccatggactcaccccaaattctttgtttcaagagatccaagggccctctcttggggtctggatcgggacccctttcctgtaacaataatggcacaacccaaatacaactactttaatgtttcagtcatctctttccattatgtctctaactgcatttatatttacagttataatgtgcataaaagtttgtgatctacttttctcctaaacattgccctaggttattagagagtctttcaactaattattttaatgggtgcataatatttcattgagtgggtggatcatcatttaaccatttccctattgatgaacagtggagattacttccactttttctcttataaataaatatactgataatcatcagtatcttccatatctgcagtttggtatctttattcaactttttcccttataaataaaagttgaacaaagatttcaaattgcagataccacaatcagctgatgctcaagtctcccatagaagatgacatagtacttgcatttagcctatatacatcctcctgtatactttaaatcatctctagattacttataatacctaatacaatgcctacacttcactttattcacatacatatattctcatttacacacacacacacacacacatacacagtgctaatgcatatgcccgccctgaattttctcctcatgactggttgtggcacaactttaaacccagcagagcatggggaggaagctggagtttgtattttcagttttgttcaactctgtgaattaggagtaccgttttcccatcctagtcacgaagtagtcctgaattgtccttgagtagaagggagagatttatggactgaatcctggtccaagtcagagagaaaagtattctttagaaagacatcgtctgatgattattttgagagactctctggtaatccctagcaaatctgcatgttaataggaatcatttactcaaagcaggggcccaggaaaatagctttacataataacagtagcttgatttgattacttcaatttggtcctagctattgaattaaaggtagagccaagcttttggaagttttacagaatgataaacaaaatgggaatagtaaattaagactgactctggattccacctgtacatctttattacttctaatgagcagggagatgtaaacaggatcgaggagtaaaaaccattgataatcttcttagcattctggataatttattggtttctttctcacattgagagctctaagcctgcctaatatttgttaagacttcttggcagctctttcctaaaagaagcaatttcttttcttacagtgcactgtagttttgctcacttgctccccaaaatactgatggacattttcagctgcactcagccattttgaatcacagcagcactttaaaaaatcctagtaattttatacttacagaggagtcgcaacagtaggacagagtacttggttacccctcaaccagccctctgtctgttaacatcttatataccatacatgaaaattaagaaattatactaagcatgagactattagctaaagtgcagaacttactcacatcaccagtttttccactaatgtcctttttctattccaagacccaatccaggactccatgttgcatttagttttcacatcttcttagcctccttcaatctatcacagctcctcagtctttctttgatttcagggccttgccacttttgaagagtaatgatcagtcattttgtagaatgtccctccatgtgggcttgtttggtgcgttctcacggttagactagcgttatgcattattggaaaggaaaccacaaagtgattgacgtgtccgtctcagtgcaccatgccatcctcaccatcctcaccacttggctaaggtgatacccaccgagattctccactgtaaactttccgttttcccctttgtaattattaaatattttagagggggagatactttgagacaatgcaaataaatatcctgtttctgcttaaacattcacagccgtactttttgtcctccaaagcaatagtttaacctcagctaaatgtcaacaagctatcaatggggacttttggagttggtgatgggcacaggagcctcaaagccattcacttcttcccggaagcccagcattccgggaaaggactggcagacctcctgacttcctccaccagctgtctgaccaccgcacactgtggttgtgacttgggatttcagagccaggagcaggaccccactcctgatcatagcatgacttagcttctccccagaatcacagtcatcttccatatgacttaggaatagcatgattgctggaagacagaaagatgtgggcctaagtaacaaaataaactgtgttctgttaaagaaaaaagtatttgtgacacttatgaaagcgtggcaaggcagacttcatttagggggattatcacaataggtctagggactattacaatggggttttatagtagggcagagagattgggctcaactctgtatccgacaaggaaaagtgggaatttatagccaaggagtgagaggggtgccagtggatggtaaattaccaagaagaaacatgaggggtaagcggggattctggctaactgtcctaatgggtttcttgctgaacacaggccagggtgatcagacagcacctgcaggatggtggaggatgagcaacttccccagatctggaaggtgatcagatacagttagagtaagtagctaggtagacatgagcaggccaggagggggtccccctccccactgggatgtcaggtgaccatcaggtactggccaggcagttgttgttgttaaactgtctctctaaaataataattggtcacagccaatgccagggaaagacagcctcccaatagacagaaaacacctgaagctggtgatcagcagccttttttttttttttttgagacagagtctcactctgctgcccaggctggagtacagtggcacgatctaggctcactgcaacctctgcctcctagtttcaagcaattctcctacctcagcctcccaagtagctcgggaggattacaggcatgcactaccataactggctaatttttgtatttttagtagagacgtggtttcaccatgttggccaggctggtttcaaactcctgacctcaagtgatccgcctgccttggcctcccaaagtgctgggattacaggcgtgagccaccgctcccagacgatcatcggctttttgataagatctcaggagtttggcaaatgtgctcaagcatgagcactaagaagcaaaatggtggagtttaaccagtatatgaccttcctctaggaacgctcaactggtaagggtaaaatgcctcaaatgagcatgcgcacaacttcagtaaactcactgtgcgtatggcccctcccaagtgctggcagcccaccaaagcatttggatgaagtgacgttgttcatctgaggtaatacccaaggttcattgtctcacgccaaggaaatcaaggacacaaacacacaagaagtgaggttaagaacagaggtttagtaagcgaaagaaagagaagagctctctctgctgcagagagaggggtcccaaatgggttttctgcttccgtggtgaaatgcagtggggttttatagatgagcttgaggaggcggtgtctgatttacatagggcacgaaagatttgtcggaccacgtgtgtcatttgcataaggcatgaaaaactggttagggctaggtgtgccatttgcataagacacaaaaaactggccaccccaccctaatcctttgttatgcagatgggttctctacctggccgtgccacattgcctgtttctttactgtacacgtggtgataaaggaaagggaagatggggcctccatgttgaacatacctggcccccaggtagcccttttctattggcacagctgccggcattcacctgtgcaagcttccagcttgcttatctatgtctgcagcttgatttttcaggctgttctttgtttgaaagacaatgatttgggggctgctttttgttaaaagggaaattctgccgagggctctgttgcccttactatctgcctgaataatttctttctacctcctgtatcatggacagcctgctccaaggaagaatcaggggagaagaaacacaaatcctggaatcatgccaatgcatgaaaccccaagtcaagggttggacagagcacttggcacttggatctttttttttttttgagacgaagtctcggctctgtcgcccaggctggagcgcagtggcgcaatctcagctcactgcaagctacaggtgcccaccaccatgcccagctaattttttgtatttttagtagagacagggtttcactgtcttagccaggatggtctctatctcctgacctcatgatccgcctgcctcagcctcccaaagtgctgggattacagcaccgtgcccggccggatcttttaagttgcccacttggccctcttccaagtgtactttcttcattttgttcctgctctaaaacttttaaataaactctcacacctgctctaaaacttgccttggtctcttattctgccttatgtcacttggctgaattctctcctccaaggaggcaagaatcgagttgctgtaggcccatagggattcactgctggtaacaataccaggagtgaaggattctagctaaaatgacttagcaggattgttgctaagacttggacaatgcagagatgaacacagaaccccaaaagtcagggctcagttgagaagagagttcagaggagcctgactagaatttggtcgaggagatagtctgtcagttcagaagacgatgagggtctgctgttctcaggccatcacagacatcatctgcagatgccctttacagcactgtgtctgtttccaggaatttatgttgtaaaatggaactgaaactcagaaaaataatggttggagattttcaccaccaaatttttctcctcttgtttgttgttctttaaaaaataagtatattttcagttcattagacttgaaatgatggatgaggaaaattaaaccaaatgtgaaaaatgggggactcagtccccaaagggatgtccagctggtggccagtcctgggaagctccttgtgtctgagagctatataaagagagaaggaaataaggaaaaatgactcccctgcatccaacttcatttttgtttctattttgtgacaataaaattatctttctgaggattctacaaaaggagagtatagtatccttgtttaacctcagaagcgattccctcgggtctatttacacaaacatagccttatttattaggtgtacccagctaacatctgatgacaagctagaggaggaagaaatggatggatccaatctagagatattaacagatatttgtatagaaggtggcaatttattgatcatttatacatcatctttctaaagcctctttactcactctttctctctgatatctgcttttcatttgtactagaccaccgataccacatatcatgtgtcaatttctttactcagaaagaaaacatgcataacagaaggtgggtcaggctggtggtacagaataagttttgcttggtgattttcatggcctgcaaagatctgagttatgtggtccagtcaggacccccaaccaatgcatccatggggatttaagtgaatattaaacttaagtgtgttctgttcatgctgcaatctcacagtttacctaaggccttgatttatggcacaataaatgttgccgaatttgagtaaataaaggtatagtttgtcttctgaaaacacaagaaggtaggcctggtaccacaagaagggatagttgataatgagagacaggagtgtaaaatcgagaaaaagaaaactattccataaaacaaaagttggggatattcacataagagcaaatatgtttagaattctaatgaaaagtcaccaggaaaagttgaacttgtgtttataagactctgattaagaaagcagggacatgtataaactttaaaaagtattctttacctaaaattgttcattttaaaacaaactttggtaccatatgaaataaacgtatttagaaatgtaatcaaatactaaaacgtatttagacccttttgctttattacaccagataatagtattcttttgggattcctgaaaagtccatgtaaatattcaccctgaccaaacgggagtgggctgccctatttagtggaacacatttttgtaagttttcttctgtagataggctagttgggagtgcactgttagaagctcccaggctgggcgaggtggctcacgcctgtaatcccagcactttgcgaagctgaggtgggtggatcaccaggagtttgagaccagcctgaccaacatggtgaaactccgtctctactccaaatacaaaaattagctgggggtggtggcagttgcctgtaatcccagctactcagggagctgaggcaggagaattgcttgaacctgggaggcagaggttgcagtgagctgagatcgcgccattgcactccagtctgggcaacaagagcgaaaccccgtctcaaaaaaaaaaaaaaaaaaaaaaagaaatagctcccagtagcatcttcccgcctccccctctcccccccgccccccacccccacccccgcatatatctgggccccgactttgagggcattcacacaaacagctccatagcagctggtgggctgggcccaattagccagtgtggggcaaacggaatgcacgattgatgcagaacccttggagaacgggccctgaatccaggagccaaatggttccttgcacagagcggaaaggattagggtgggcgaccagtttgggagcaagaagcagtatcccaccaacatgcaaagccttttctttctctacacaaccccaccattgtctatgacataatgctgttcagtggcctccactgcaacattcaaggcccagtcctgtcttctgggaacaactcagatattaattttgaaagcagtgggtgtccttcacacgcagactctaaacagattctccattctacatgtagaggaagaaatcgagaataatattttgcttttaaaaaaaaaatttggtggctggttcttcttgctctccaagaaagcttgtttgggaatattaaaaaaacgaagatgtacagctcctctcctgggtgaaaagcacacagtccaaagagtcgtatttgtcaggctcacaggatgggcgggagaggaggtgggactggtgggcggtggcttttcaccctctgtacctaggtttatggcctttcagtatttaggggagctatttttacatgtagcttgctcctatttttttctgattggagtctctttattaaaagaattgtttaatttgaaatgagtaacccaagttactcggcaagatataaagattaagaaaagataacaagagatgaataaatgaggtagtggaattgcttgataactggagtagtgccttagaagctctctcccaagttagaactattctttgttgttaaatgaaagttaaaatatgccattttcaatgtaaatacattttttcccagattcatactatcctatattacaattgttttcatttcttcatcataagaaatcatcactttggagttttatttatgtatgtcctgttttcacatcattttgacagtcctgtagatatgctatgtttttcctcacagccctaattatatatcatctttatcatttttagtaaatagataatatcccattacaccaatgttccataatttgttatctgttgccctttgctaagactttggttattttcagcttttcactcccacaaataacactgctataaatatatcaatgcatacaccatttctccttttaaattgctttcttgaaataaattccaaagaatgagattacagggtcaaagagtactaacatttttatgacctttgacccgcattgattgccaaatgccctcaaaaggcattgtaccagttttcaaagaatgatatatctgctttccccacaggctcatcaggcattgagttatagggttttcctgtatttttatttcttcagtctcaatgggttgagattaaactatatgcccattggagaattattataagtagctatacaattcattgattacttaataatgcttaggatacaacagaaaggaaaataaagcagaaaaaaaacaagccaaattaaattctttctcagttgtgttaaatgcctttgtatattgaatatctgtgagcatgctaagcttcaacactgagaacaaagaaatcagttctgaaacaactagaataacatcagcacaccagagtcagataacttagttttcatttcataaatacattcacacactcacaaagctctaaactttgttagaagagtgagcctaagagaaacaaatgcttacttgtgttatcaatgcctaaagcactgattttgagcagcaaagatttgactctctctgacctcttgcaaagatgtccaattatttcacagttgttcttctgcttttcctctctgtctcaagctatcttgaatagggaaagagtgaaaaaaggagtaaaagtaaaataacaggggcaagagtctctcgttccttttgtgaattttgccttcggcttggttctgttttctggaaaatactatgcaaacatggaaatgggtaagttgtctgtcaatgcactttgcagatggcatggataaatgaagaaagccctgaatatctaattctttgtgaccagctctgttcaaatacagttccttcaacatttcatataagtgatgccttaggatttctgtaacacacggtttgcacagcgtagacatactatgagagtctatgggatggatgtttgagtcaaatgtggcacgttcatagaccacttggagtatacaatcaaagatccaaagaaaactattggtgtcatggaaaccttgctctttgggaagtaaatccactccaactgaatgggcatcccttcctttctcagccccaccatatcaggaagagtgtacttggtgtttatagctatgagtgcctgaaaaacaagaacaggtagatttgtatgttaaggccccatattgatattggaaaaatacaaaccaggaagtgcaaatgttagcttggatctgctcttacctcccatcaccaccacccacaaagaagagaagaaaaagagccagaaaatgcacccagagccatcagaaaagtaagggagggatatttttatttagtaccaaacccgaagagagggcagcaggtgcggtggctcatacctgtaatctcagcactttgagaggctgaagagggtggattgcttgagcccatggggttcaagatgagcctgggcaacaaagtgagactctgtttctctaaaaaataaaaataaaaaattagccaggcatgctggtgtatgcctgtagtcccagctcctcaggaggctgggaggtgggagaatcacttgagcccgggaagtcaaggctgcagtaagccatagtctcgccactgcactcccacctgggtaacagagtgagactctgtctcaaaaaacaaagcaaaacaaaaaccacccggaagcaggtatcctttgagttcctgtgactgaaccagttcattgctgacttgtttgtggctgtgagtcgcctcagtcttgcttgctgctggactgtgccattgatggtgacccccatgggggcaggctggggtcaggctggagtccttcagcccttctggggagctgctgctttctagccaaaccagggggttagtggaagggtggaaaggtcaagtaactaagaagggtgaactagagaaagacgtggcaatttgccagagtggtcccttcatttagagtaaggaattgtgtgagtgaggggcctgcaggctggtaaacagcttgtccatctccagagaggacccaccagtgtcaatggccgattgagaacagggcacctcgctgatagtcacagagacgaccaagactggaatttcaagtggaatttctccaaaccatgttggaacactcatgaatctgacttgcacatcaggctgggaagtcatctagccccaaagctatgtccttggggaaggggaaggctgaaggctgaaagagagaaacttcccactcatcaccatatccccaatatccagtctcttcctatctccctctccagcaaaatcagctgctccttcccctagccttgaagagcaccctgtacatacttctctggcgcactcagcccattgtatactaacgtgtttccatgctatcttcccagctggggcatgagttcatcagtgtattccagcacatctgggttcacattccaactcctgtctcctaatagctatgtgacttgaacaagccacttctctgagacctttgtttccttgtccatcatgtgctaataaaagagtctacctgattggatagctgggtggatcatatgagcttctacaaaatgctcaggtttatcctcatcatccactgggcaatttctagcccagagcacagcaccctaatagatatgctcggtaaaggacattccagctaacgaatggttctcgggcactgtgggtaagcatggggttatggctggacagtgtcactgggcacttggtagattaggaatttcttttctggaccttggaaagcaccactgaaaccattttggttatagcaggttatttctgtcggtactgacacttcatcccgaatctccttcctgcatcaccccaaagcaggacatggaagtataaaccttcttcacataagccagctaaccttgggattttatgtagtgcagctcatctgttctctttttccctttattttttattttttagatggagtctcactctgttacccaagctagagtgcagtggcgctatctcagctcactgcaacctctgcctcccgggttcaagcaattctcctgcctcagccttccgagtaggtgggactacaggcacctgtcaccatgcccagttaatttttgtatttttagtagagacggtgtttcaccatgttgaccaggctggtcttgaactcctgaactcaagcaatctgcctgcctcggcctcccaaggtgctgggattacaggcgtgggccaccgcacctggccctgttctctttttttctcgacgcatatttattgagtctcatgttgtgctgggcattctgactgctgctatgggtgcttatgtgggaacacaatccagtccatgttctgtagccctgggaccccagtaaggtctgtgcagtgtggaaggttaggaagaccctaataaggcccagggatttctccctggagagcatcagggaaggctccacgggggacaggcactgtcaaggtgatcagcacccagacctgcagacattgatattgaccacatgagccacgtgggcagaggcagcttgattgtgacaagaataaaacttaaacttaaggatgctcatttgcacaccatcttccaaggcttgggaagggccccaccaacagttcacatggtcatatgtttttgtaaaatttgtatctgttagatgttttaaccccaatgcagtaagatgctgtctcagtgctttgcagcctgacttccttcctctctctcctacttccctgtgtctgtgggtgctggagtggccgagagcatgtttgggatgtggctaagtggaactggatcgggaggccggtttgggtgagtgggatgtatttgcgtgcttttctgtcgcttatccatggttgaattattgctggtcattcgggcatagaaacagcttccaggagtacacctgttacccactgaatggagttcctagaatggtgacagggggttgcagggtcagaaatcacatcctttggtgtccagcatcagaaacaggtgggtggtgcaggataaacaacgtttaaaatgtgtaaggtgagaagccagtctgtggaaaagtattgcagaggtgtgtccagatgctaattaaagaaacatttgcatgcacacacacacacacatacacacacacacacacacacacacacagtatttctggattctgtgatgtttgatatttttcggcttttaacttttgtagtttgttgtgatttcatttctcattttaagtgaatatttttgtttatgcctaattttctattcatactttgacaatctttttcttaaatgtagaagctggacttgcccagtttatgactatcactcatcccaaagtgctgtcttgtagacacattcctgggctcctgggaccctggctctgacaccaccagagtccctcttcccaggaggcagcagctgctccattccttgcaggtgctggagtccaagagcaccaaggggtacctggaggccggggcctgtccagtggccttccttcctggccacatggctgcctttggccaccagctgcctgtgtgcagtctctctcccgagaatctgtgtggccattcatcacaggcctcctcttggaaaggcaaagaaggttgcattatactaggtaaagcttatcatttgcatctgccaagatccatgcatttcccctccctccctgccccgcagcccccagcaacttccctcctcccttctttttccctctcttgtgggttttcaatagtgtgtgctttcttctttttccccttctttctggtcaagacagggttgtctctctgggtggaaaaaggcagtgtgttcgtggagtgcagctgcatttcaaaggtactttgttggcgagttatgaatttgcctttgctactgtggggaaacaggcagattctttgcctcccgccctccccaaattgaaattgatgttatttctctgccagtggtacccaaggaaatgttttgttccatttcctcccctttcaggctgagccctatttatgttgggagctggggccctgccactgagaatcattgtcattaccaccagcgtctgaggctggccaaattcagcagctgtggtttcatgcctaccctcaccaaggtttattcccttgacaacatgttcttgtttggaccaactttcttagcctttctctcgttgttccccccacaaccctacccccgcccttcctgaaatcacccttacagttgcatggagcttaaaattacaaaggaaaaagtgcaggtgcgtgtgcatgcgcgcgtctgtgtgcatatgtgtgtgcgtgtgtgcatgtgtgtgagcatacatgaatgtgtatgtgtgtgcatgtgtgtgcatatgggtgtgtgcgtgtgtgtgcatgtgtgcgtgtgtgtgagagagtgtatgtgtgtgtatgggtgtgtgcatgtgtgtgcgtgtgtgtgtgtgtgtgtgtgtgtgtgtgtgtgtgtgttggaggcaatgagcaggggattggagctggaaaggagataaagaccctgggagttagaataaggatacagggaggccagcgaatggggtgaagggtgggaagtttccccataagtaacgggatcaaattaattattattttggtggccgcctctcttctccaccccaagccaggcaagactcaccctcggccctgcccgccccagcatttcaaatggaatacctaggtggcccagggggacccctgacccctatatcctgtttctttctgcctgctttgctacttttctccttgataaaaggagagagtgagagataattaacaaaaaacatggccccaggacaatgaaacaactggccttggccggccagaaatgtatcctggttttctaggtgaactttctcccatcaatctttcctttaacctctctgttagtggaagcaataggaacacccctcccctcccctgagcaaatgctttcttttgactggaaacaaaacaggggctcggcgaaggctgaggtgaaatctgggtggcatgggcgccgcacaatggggccgctgttccccggcccgggcttgtgttttacaacaggggaggggcgggcgtgaatggtctgatgattggaacaatccccccgattcaggcctacaaacgcatcttctgttccacaccgaggggacagaaaggagaaaagtgacaaagaacgcggggcggggggaattaaaacaaaatgcgctcgactaaaaaatctctcatatcctgcatattccagaaagcggctctatggagagagccttcaggaggcctcagccatatctgaatggctttctctggcctctgatttattgatgaagctgaagcgacttgctggagaaaggcctggagccttctttgtctccgagatgaagtacaataggccacagggcggagatctcttgtgatgctctcgggtcctgcctttctcttgccctctcctccctgcaaataccagcagcggtgacaaacgattggtggtgtgcctgggagagccggtgacaagactgggccacttgaggtctccttaagagggtattatggccagggcgacgtttgtgctgtgaagatggcacactccattttgtcaatggctctcatcggcccagataatcgccccctgcctgcctgtcaggggcgcagccggccgattcatggcgccctcggagaaagtaccctttccgtggcgaccaagatagagacattgtgttcacctccttgagcagaggggaaggtgaccaccagggcagcctgccttgtaaattaccctgaaaacaaaaacatacagcgcctcctcggcttgggacccccaccgataaattatggccaggctgtggagcagagcccaggagagactggttgctggagagttcctcccccaaaccccacgagcgatcaagaggcctctgggtccggaaaagggctgccggggtagctggcatcctgagtagatgggagcctagagcatcccagagggtctccgctgtgttttcaggcagagtccagagccagaccctcttgcctcacaaatttgccaggagatttcacccaggtcctctgtggcttcatacccacctcttcctgcacttttctgtctgccagcctccagccttagacaccatcagagagaaaaaagaaaagaagagaaatgaaaaggatggagggagggagggaaggggagatagagaaagaagggaagaaggagggaggaagaagagagggagccaggggaagaaaataagttaaaaaagaaagaggaagagaggaagaaagaatggaggagagagaaagggaaggaaggaaggagagagaaagagagagagaaagaaaaaggaaggaaggaaaaagaagaaagaatgagaaagaaaagagagaaaggagagaaagagggaaggaaggaaagaaagagagaaggaaagaggaaggaaggaaggaaaaggaaggaggaaaggaggcaagaaaggaaagaaggaagaaaaccgccatgattcatagctaagaaggagggaggggtgagggtgattttactaaaaaatgagtttcccattcttaatttaaagtctgcagaagctcactttatgtataacatatataataccacctcactgctgctggctcccagccaggaaggacatctccttatacatgtcaggcaccttgtaacttggcatatcaagttatttaccaaaattaatgttccaagaaataaatatctttcccactcctttaaagccataagttttcaaaaatatccatcatacttcctcaaatgcatcgcacacatcctcaattctaaacagaagataccaaattgaattgcactttttttaattgactcaggctcaaataaaatagaatgtgcaaaagtgctctgtaaaccctaaagcacaatgcacccgcgggctattcttcttcctctcaatgacttgccctcccgcctcgcgaccctgaggatgatggtctgggaggtttggtgcctgcttttatagcttttctgtgtccttcagctgtcactttagcttgtgggggcaccttgccttcattctactctgctgtttctattggcttgtgaaggctgttaacaaggtgtaacaagaataagtgtcaaaactctggctttgtgatcctgggcaaattatttaatttctgtgtgcctgtaaatggaaatggaaataatacttactccaggatattattgagaaggttaaatgaaataatacacatcaagcacccaatggggattgcagtgtagtaaatatacaataaatatgagttattattaagatgataacttagtatcattaggaacaaaatatttttcctgtgacaggcatgaatttcaaccattgtatttggtacaataggaagatctttaatttttgtttgcttctttccagtttcttggcttgatcctatatcataaggtggctagatagtgtgcttccggaaactgaagtgtcatggtattatgaagccagttgagaagggagcagagatttcaccaagaaataagttctgagcctagcccatgcagagactggactaactttatcggttgagaagattttctgaagtgcacaaaccccagatctgtagccctcgtgtggtccatctcccctcatcctcatgtctgcagttcactgagaagaatcacaatgacgacacaatagctgtcactcttgaaacacctaccacgcaacaggcttgatgcgcagagctttatttacatgatgttttttgtagcctcaccagtgagtttctttctgaaggtccataagctgctggaggcttattcattttcccataaggggctgactcccagggaggtaaaggatgtgcctggactcacccagctggctaaaagggtccctgttgcttaactcccaattcggtgcttttgctactgccctgtgtcacattcttcttggtccagcctcctggattcactgtgagtctcaccagaggcacatcgtttctgcgtcttggcaaaggaaaggccagcagacatggggaaggcccagggtcagacccgcctctgttggagcaccccaaggataatccttagatgaggagaggacaggggaccaagcaactctcacgcttccccaagttacagtttatttttccattggctgcataattatgttttattgataatacatgattggtgtcaatgaatctccacttctagaaagaaccactgttgaaacttcatcctgtatatttttatcaaaatacacacacatatgagtgagatcataaacttgaaaacatttgtttgtctgttttttcatgagcaggagagtgcggtgtttaagaatatgggctttggagtactttatgtttggagtatttcccttctctccccttctctcgccttccctccccttccctccccttccctcccctcacctcccctccccaaggcgtgctgagggacaaatgcattaatatctgtgatatatttgcaacagcatctggcacacgaatagtattagacaagcgaagttttttggtcataaataaaacaaaatatgattttatatatcaatacacacaactttatgtattaatacaaaaagatcaacctttgctttctcaaagactgtactatattccattctatcattatttattgaattaattttccagtgatggacatttagctttttccaacttttggtatcataaacaatgatgcaacaaacatccttatgtatattattaataatatagacattttgtcatacataaatacatatatacatatcttaacatgcatccttatgtatgttattgataatatacatattctaatgtctgtcttattgtttcctttgaataaattcctaagaaatggagttactggattaaaagatgatataactagtctgtgctccagagaggttagatgaaatggtatttcaaccaaaccctcaccaatgcatctcattatcgtgtttgtcatctttggcagtctgagaagaaaaataaaggaggggtctcattttgatttgcgtacagttgattaaaagcaagactgagcatcttttcatgtgttttgttcacatcctctgtccattattctaccgatgtcattattaaaattattatcactttgtcccgtatgttgcaagtatttgtgccagtttgcagtttgtcttttaacctcgtttctggctccctgtgccatataaagcaagggtggagggagcaacttggagaaagcaccatttcagcagagacagggaagccaagtcttttttatatttatttattaatttttaaatttttatttatttgtttttgtagagaaggggttctcactatattgcccaggctggtcttgaactcctgccctcaagcaatcctccctcctcagcctcctaaagtgctgggattacaggtgtcttaattcatggctggggtcccccaggatccctagcataggggcatacagggaggggtgtcattccaagcaaacagacaaccaggttggatccaaaggcctataaaatacctaaagccatcaacttccttctgccaacgaaagcaagatgaaatttatcacctgactcctacacaaggatataggtccctcctgttccccttcttaatttatcacctgagtcctatacaaagataaaggtcccatctgtttctcctctcctttcctcttctctcctctcctcttccctcccctcctctccccctccctggccctcccctctcctccccctcccctgccctctcctcccctcccctcccctcccagcatgaaggcagctgcaacagtatgtctggtgcccaggatacagggtattggggacagggtatggaggtagggggcagagaaagcaactctttggagactggttacaataaacaagcaagttacttacttgagtcagcaaataagcaaatataccaaggctagtgagaggcaggttgctcactgtcagagaatggatttacaaagacattagggagaaggctggaaagaaccccaaagtgttgaattagaattagaactattattaaataataatttaaaaatatatatttgagtattttgtgtgtatatgtaaaacagacatacaacatacatacatatagcaattcctatatatgtatatataatgcacatacatacatatagatctagaaattgttatagatgggtacatgtatctgtaaatggacacttacactttcacatatgtacttgctttgtccctgagacaaagactcctcagtaacaatgaaccaactaagcactcagatcttggtttctaaatacccacaccaaaagcagaaaaagctctatagagaatgagtgatacaggtctcttagtccatttgcatgctataaaggaatacttggggctgggtaatttataaagaaaatagctctatctggctcgaggttctgcaggctgtataagaagcatggtgccagcatctgcttccagtggggacttcagggagcttctactcatgatggaaggcaaagggagcaggcattacatggtgagagatgaaagaggaggagagaggaggagacactaggatctttataacagtcagattcacagcaactaagagtgagcactcactctaccccatgagagtggcaccaagccattcatgaaggatatgcccccagaacccaaacacctcccccagggcctcacttccaacacagggaatcaaagttcagcatgagacttaccagggccaagcaaatcatattcaaaccatagcaacagggtacatataaaacgagcccggaacacataattgtgccacaaagtaacgaaaggctcaaagaatgctagagatatgcccacgggatgcagaagccagcttgaacaagctcccactggccagagctaggataacttgggaatcaaaagaagtaatcataataccaggttataatacattgaataaaataagagtccaagtgtctgtactgatataaatgaatgaataaatggggaagaaaaaaacattttttgctaatagtagaatacctgttaacaaatgtaaaaggaaccgtgcctgtcgaatttttgcattttttttttttttttttttttttagtacagacagggttttgccgtgttggccaggctggtcttgaactcctgaccacaagtgatccagcctcccaaagtgctgggatcacaggcatgagccatcgtgcctggcccaatttctgttgttttaagtgacatagtttgtagtactttgttacagtagccctaggaaacgaatccaacatttttctaaaaatatgcaaatggccagtaagcacttgaagatgcccagcatcatcagccatcagggtgaatcgaatcaaagccacagtcagcgagcactcgcacccctatgagtgctagacccaaacaggcagggaataaccagtgccaatgagaatgtggagcaactggaaccctcgtatattgctgatgggaatgaaacatggtgcagctgccctgggaaacagtctgacagctcctcaaatggctaaacatagagtcaccatatgacccagcaattccactcctaggtatatacccaaagggaatgaacatgtgtatccacacaagaacttgtgcacgaatgttcatagcaacattattcacagcagtcagaaaacaaaagcaatccaaatgtccatcaactgatgaatggataaataaaattggtatgcccatacaatgggatgttatttggcaataaatgaacaagtaatatgaactcataaataaactacgatgtggatgaaccttgaaaacatcatgctaagtgaaagaagccactcacaaaggatcacatgttgtatgattccctgtatatgaaatgtccagaacaggcaaatgagtagagatagaaagtaggttagtacctagggctgtagaggttgaagatactgggggtgacagataagggatgtggggtttctttgggaagcaataaaaatgttctaagattgtagcgatggaggcatgactctgtgaatatacaaaaatactactgagttgtatactcaaatggctgaattacatggtatgtgaattatatctcaagctgtttaaaatgtagatggaattatgaacactgatcatcatcatttggcaatcatcatagctgtgattaattggggagaaagtagaaaaaggtagtggtataatctcatactatcttcccacaaaatgtgaattacaggtatgtacaaaggagaaaatgatgccttcacagtagagaaagctggtagatgtaacttggctgggtcatcaagggtcacagtgcgaggagaggtgggtgccaggagcctcctgctgtgacacacggagggaagacagcatccttcctggggtcgccagacaagaaatgatggcctgagtctggtcaccaggaatcactggccagacccaggttaagggtcgccctatatgatgaaaggcctgtactcctcaaaactgataaggacatgagacgcggggcaagacgggctgaaagagactcatgaaacctgaagacttcacgtagtacaggcccctggatgggattctggaccagcgaggaacaagagacgttatggggatagttggcaaaatttgagtggggcctgtggggtggaggatgaggttgtatcactgatgacgtcctacataggaaagctgtatggtggtgtgtagaaaagaattcttgcttggggaaggcacacactggagaatttaggagtgctgggtgtatggcttgctttcaaatcgttcagaaaaagactaatggcagtgtgtgtgtgtgtgtgtgtgtgtgtgtgtgtgtgtgtacctgtggagagaataaggctgacaggataaaggaggtaaaatgctaacagctgagaactgtgcatgaaatagatacacatcctctttatcctcttcatactgttcttgcaacttttctgttggaattaacaccaaatacatagtttaaaagggctatcagatcatagaacgaactacctcaccaccactatatacctagaaagattgtttaaatgaatttttctgcaccacctctacaaaaaatcattacagatgtgtgtgagagagagagagaagaaaaaggacaattaaaaaaaaaagagcagcagtgacaatgaaaaaaggaggtctgcttttaagtactctaacaacacaatgtttatacaaaaagaatgttggggcctcgagaataagaacagagacgctcaagctcccagatactcctcaggtgtcacctaaagctgtttacacaagttgcactgcacactcacttcatggttagagatgagacacagacacagactcccttcaccccaaatgaaggaagcatcatggtcccaacatccgcaggctcaccactcattccagcccccgtttggaatctgtagagttcttaggctgcagggctgtgattttcataaagtggttgcgtttgcagcactgataagacataagcttgcttttaagtcctctccaccaaagtcatatgatggggtggaaccttcctggaacagatggaccctcggaagaatcttctgggctgaggaagtggtttggcaggaaaatagaaggggtaattccaggcctgagggtgcagtacagagcagggaaaagaagaggtgctacaagagtcaagcaaagacataggcctgctgaggaggctggggagggtggtgaactacaagggaataggggaaggagactctgaagcctccaagagtaaagacatggttttggggatacagccagtgtcggcaaagtataggcactggaaagccttctcagggcaacatgcaagagagaaggtgggaatgtaaagaaaggggcctggcagagaggtcagggtcagtaaagcacacaccagaggatcctgggtgtattagttcattatcgttctgctataaaggactgcttgagactggaaaatttataaaggaaagaggtttaattgactcacagttctgcatggctgggagacctcaggaaacttacaattatggcggaaggggaagcaaacgtgtccttcacatgatggcaggaaggagaagtgctgagcaaaagggggaaaagccccttataaaaccatcagatctcatcagaactcactattatgagaacaggatgagggtaaccacccagtgattcaattaattcccaccgggtctgtctcataacacgtggggattaagggaagtacaattcaagatgatatttgggtggggacacagctaaaccatatcactgggtttctaaacgagccgccaaatgtaattctcagagtcttcacttcaaagacaaggtcattaagacatgtgcttttggcacctcgttcctgcctctggtgcatgacacacaattggttttttgctctttttactcatttctcctcatcgaatcctccctatcttagctcaggctgctataacaaagtatcatgactgatgacttataaacaagagatatttatttctcacagttctggaggctggtagcctgacatcagggtgccagcatgatcgagttatggggaggaccctcttccgagttgcagacttaacttcttgctgtatcctcacatagtggaaagtgagtgagagagctcctggggtcccttttaaaagggcactaatcccattcacgagggctccaccctcacgacctcatcacctcctaaaggccccacctcctaatatcatcccactgggcattagatttcaacatatggattttcggggtacataagcattcagtctatatcactcctcccatttttaataataatattggagatattgattcactgtctcttgacatccattcctgcaaatgtgacatctgttctcagtttaagttttatttatatttgtcttctttctaaaatctcataagactgttctatctttgcatttcattacatcatgactaagtgaaggttcgtttgtcgtggtgcagcattgattgtatacacagtagcagggaacttactttaattctgtgtctttctttaattctaaaagttctcacctgagttttccacgtatctccatctgaaacacttatgaggtgtgtgttggagcctctcaaccagttttctaagtcgcttaactgttcttgcatattttttattctctttatctttctgagatgcattctgggtgaattcttgagcatcgttaactaattcccttctcagctgcatcaagtatggagcttgattttatgtcttcagtcttgtatttcaataaccatatttttcattccaaggattttttattttgttcatgttcacctgtacttcttccatttctgccactgtttgtttcctaatttctcatccttcatttctgggaggacctaaaccacatttattagaaagtcattttcctattttgctgttgttttcatttctctgggaattcattctccaggtgattgatttttttcaaacttgctgttctttcttaacatttgcttccttcattccttttgaaatcttagtttgcagagtcatcttaaaggggagtcccctttccttgctttctgtgataccccctgctgccatcacacacacctcctcatgttccccagaccagaaccggaggttacatggcagctggggctatgaggatatggaggttcctgctggtagcttggcttagggcacagctatgaggcccctctgcctcctcccacctccccgggtgcacagttacctagcggctatagtcccagatggtgttggtagcattcttcagtctccagcattctaaagtctcagtctttagtttcaagcctgtccttggtcacctgccacacctgggacacctatagtccttcttatcccacaggagctgaggttgtaactgcctttcctgtatccagacccagaggccagcacacctgtggattcagccccacctccatgttgagtttctcttgtttcttgcccaaggacatgctacttacccaattttgatatcaactatgcattttaagtaccattccttaagtttttttcctgtcctatcacttctatatatcagaatgaaatggagttgaagggccctcagtgcatgaaattacaatgctataatcctgggacttgccattcactttcaccttgaatttctttatctctaactttaattgtcttgtacttgctgtattgtttcaaaccatcttaaatccttccaataactaggaatgggatacatactgtgttagtcccctatggctgcaataatgaagtaccagaaactaggtggcttagaacaacagaaatcttatcccacagttctggaggccagagtctgagattgaggtgtcagcagggccacacttcctctgaaactggcaggggaaaatgtttccaggtggactggttaatcatctctgcttaaggaaaaggagacagaagcccccaggggtgtgatcttcctaaggtgacatagcaggtcatttgcaaaatggggatggggtaacattaagtgaaaagagtaaaattatcaagtgaaaaaaagtatactgactgggcactgtggtttacgcctgtaatcccagcactttgggaagccgaggcagatggctcacttgagcccaggcattcgagaccagcctgggcaacatggcaagaccctgtctctacaaaaaatacaaaaattcaccgggcatggtgatgtgcacctgtagtcccagctactcgggagactgaggtgggaggaccacttgagcccaggaggtcaaggctgcagtgagccaaggttgtgccactgcactccagcctgggtaacagagcaagaccctgtctcaaagaaaaaaaaaaaagtctatcacttgtgcaaagggggcccattttgcttaaacaatggggagaagttagctcaatattatagaaacatatttaattacttaaggcaacccatctatgtatctatatctataaacatacaggtagaagtttcatgcatatgatatcgtatgatatatgtctatatccagctacctatctgtatatatatttagctagacagtatgacaaatgtcaaacctaagatgaatccacagctattcaaaacagcagccttgtttaaaatatgggagaaataaaaccacccacaaagtttaattagtgaatttccttaccagtccggcttctctagcaagcagtaagttcaaaatccctaactatttccctgcaatccttcattgctcacccagtggggcagaaggcagatcttgtccaagacagccatgaacacattacacgattcaccgggagactcctccagcaccttgacctgcaaatttccaaaggagctgctccgctgtcagctctcacctagaggatgccccagggggcagggcacagcaccacatctttgctctctggggttcacttgtccagggcttggagcctgcagggaaagaggctgcgtatccggcaaacccatctctcccaaactagcatttcaatcccccagccctgcatgtctgcctcatgacaaagctattctatgagcttatatctctcagggcacgacttggattttcagttttagagccctgagtgatgggttgtctcagttggtcctcaaatctctttcctttgtgtgttttttgttgttgtggtggttgttattttttgtttgtttatttttgtttttgtagctctaggaaacctctatgattctactctgtcaaaaagaatctacaaagccccctctcttccgttgggtaaaatccaaggacccattggtacctgatccattttgagaaacacaagccctggggagatatttgcccagctgtggggagccactctttggagcagttcactgtttgtaggatggtgaggagagaggaaggggacagggtgaagtcttaactcatgctcacatccagacagacttttttaatcgcaagtagcatccattcagtttctctaatcagcttcaaagacctcgtaaggctcccattaccattgtgtggctggtaattctgtgtcacaactaattactgcctaatagctgtcacagatgcagagtctccagtttaaaagccaagtcgatttcttcctgcattcagacctcgtctgcccctgagtggtgcagattacatgaggtaatacggcagttatttctacctgctgcagttcatcagctccatctccagctgaggtagccgcccgtcccccttggacaaagattatttgtcattaaaatgctcaggctcgctcacactctcttttttcaatctggatgttgcctacactttgagaaaggtttttgaagaaagattagcaggattaggaaaggttcacatatgttcagcctcactcttggtattcaagacatcacaaccctgcaccacccaggaagcacaagaaaatggagcacaggcagaggcccgggaggggctggggggtgagggggaagctgtgtggctcccccaccaataatacaaagctggagtcaaatgcaaatctgggggtgttttacgctggggaattcccaggcagtttcctagaattttttaaattaatttttctatttccataggttattggggaacaggtggtgtttggttacatgagtaagttctttagcggtgatttgtgagattttggtgcacctgtcacccgagcagtgtacactgtacccaatttgtgatattttatccctcacccccttcccaccctttccccttgagtccccaaagtccattgtgtcattcttatgcctttgcatcctcacagcttagttcccacttatgagtgagaacatatgatgtttggtttttccattcctgagttattttacttagaataagagtctccaatcgcatccaggtcgctgcgaaggccattaattcatttctttttatgcctaactagttttccatcatatatgtcacagtttctttatccagtcattgattggtgggcatttgggttggttccatgattttgcaattgtgaattgtgcagccataaacatgcgtgtgcaagtatctttttttgtataatgacttctttttctctgggtagatatccagtagtgggcttactgggtcaaatggtagatctacttttagttctttaagaaaactccacactgttttccatagtggttgtactagtttacattcccaccagcagtgtagaagtgttcccttttcaccgcatccacgccaacatctattattttttgtttttttgattatggccattcttgcaggagtaaggtagtgttgccttgtggttttgatttgcatttccctgatccttactgatgttgagcattttttcatatgtttgttggccatttgtatatcttctaagaattgtctattcatgtctttagcccactttttgatgggattatttgtttgtttgtttcttgctaacatgtttgagttggttgtagattctggatattagtcctttgtcagacgtatagattatgaagattttctcccactctgtgggttgtctgtttactctgctgactgttttgctgtgcaaaagctctgtagtttaattaaatcccagctatttatttttgttttattgcattttctttggggttcttggtcatgaaatccttgcctaagccaatgtctagaagagtttttccaatgttatcttccagaatttttagtttcaggtcttagatccatcttgagttgatttttgtataaggtgagagagggaacttttgtttttagcgctgttttcttttctcttcctgtgtgattatttgtctccttttgagagcctgaccagcaaaggagaagggaggtgtcagaggcaggactcaacaacttggccttgaggcaggttctaagagccatgccccacccaacagctgacccttggcagtccttctgtctactttttcttgccttagctaccttctcaagggcaccaaatgaaggaagggtcatggctcccaggtcctgtgagaaaaacctgttcccaagttggaatatttcattgagttaaacttctaaccaatctgcactgatcactgggtgtcttagtccattcgggctgctctaacaaaatatcttagactaggtaatttataaataatagaaatttatgtctcacagttctggaggctggaaagtttaagatcaaggtgccagcagattttgtgtctggtgaagcctccatctctgctccacagagggcaccttttcctgtgtcctcagacagtagaagggcaaaaaggaactaacagactccctcaaacccttttataagaacactaatcccatccatgaaggtggagccctcatgacataaaccacctcttaaaggccccatcgcctaatactatggcagtggggattaggtttcaacatgaatttaaggagggaggcaaacactcaaactgtagcactgagtaccaagaagaattaaaaaggggaaaagaaatggctaggtagtcttagaatcttcccaaatctccctgtaaaatagaaagagcaactagaatagcaaagcgaaaagagccatggacagtatccacaacagagctggtagtgaggtaatcctcccagacaccaaatactaacaggtctgggcaaagcatttacagttcaagaactgtgtggtggcagcattagtgccggaagaagacacgtgataaaaactgtggttctgaagatactgagagcttgagaatcacacaatcacctgcaggtattcaccagagggcacagcaagaccatctgagtacagcaaccaaaaccaggagagctatctgaaaacccaatgcatggctaagtgcaagaggactgtgatacaataaggtctgatggtgtcggggtgatttgagctccatatgccctcaaagtgaacagagtctcttccaatacaaagccttgcactgatgagtatctgggcagatcaatacaggcaaggaaaaaagatccagataaatgggatgggggtgggcagagcagaagaggcagctctcaaaacctttggagatttttgttttatttccttgcgaaaggaacaggagagggagctctagagcctttgaactggaaaggttgccccagcatacccttcactcctaaaagtataggaaaattcatttcatttagaaaataaacaacagaaaagcattgtggtaaaaacttataaaaagttaagaaggaaaaaatgaaaagaaagagcagaaaaaattcctacaaaacgatgaaagcgtgtccaaaaggaatgcccacaaaacatttcaaatattatgaaacaagttaaagaaaattaagaaaatgatagaagctatgaaagaataacatacctcagaattagaaaaaaagctcagaaataaggtgactggagaaaaaaaatgcttgaaaagagggatggcacagtttagaaaataactagaaatataaaaagaaaggtctggagaaagacactgatgtaagaaatcatagaaatacaaaggacagaagagcatgttaaatgacactgtgggacgcaatgaattccggactgtggaaaattctaagtcaaatggctccgttttttcaacaacaaaaatggaggggttaaaaagaaagaaagaagaggaaatgtataaagaaaagagatttataagtcatttcaagcaaatgcaaagtaggaatcttatttcagttctggttcaaacaatcaattttttaaaatataaagcaaccaggaaaatataaacatgacaatatttaataatattaagggattaatatttttaagtataataaaaatattgtgattttttaaaaataatgattatctattagagatgcatactgaaacgtttataaataacagtacttaatgtctgggctcactacaaattatccaggaacagtgggaacagaggcagatatagaagaacaagattatcctgtattgatatatatcaaagctgattgatgagtacttgattgttctttgtattatactctctacttttgactgtctgaatattactgtaattcaaagcttaatgaacaaacaaataataagggaagtcttagagcttggcatccaccaggaaggaataccttttgcttctttcctgagagggctgtgctacctggagagggtttcaatagatgcagacatacattgtaacccatccccttcagcccttcttcccattcaagtgttccagtatatttgtccctaaactgaactagatgtgttactctgtcacttgctagaatataagatctatgaaggcaagaatttgtcaattgtgttaccattgtatccccaggacccagaatagtgcctggcacgtaataggccttctgtaaatatttgctgtttaattgagtgaatcgtcatgactgatcccaggacataatcccaggctgtaactaccactgtgtgttttttcttggagagaagagggagaattctttactttgtagacctaagcttgggttacctgcagaagtggcctctaaaatgtgagataaacaatgtctgaccttgtagcaatggagaacttcaggcagctgctgagctgctgaaggtccacagagtgtgaaaggactgagcaatgtgactaatgattgcttccctttgcaaagtatccagtatccagtattcagccaataagccttacattagatgtagtgttaaatatgttggtaattgatgggaataaataaatgtaaattttatatattatttgtttacatacgtgatattacaaaatatatatttggccttcctccctgtttcctggcatacaacacttaacgtcaacatccttggactcttcaaagtggtgtgtcttatttgtagggaaaagaaagagaaatcagactgttactgtgtctatgcagaaaaggaagacataagaaattccatcttgatctgtgccaagaaaattgttttgctgttaatctgtaactttagccccaaccctgtgctcacagaaacatgtgctgtatggaatcaaggtttaagggatctagggccgtgcaggatgtgccttgttaacaatatgtttacaggcagtatgcttggtaaaagtcatcgccattctccattctcgattaaccaggggcacaatgcactgcggaaagccacagggacctctgcccaagaaagcttgggtattctccaaggtttccccccattgagacagcctgagatacggcctcgtgggaagggaaagacctgaccgtctcccagcccgacacccgtaaagggtctgtgctgaggaggattagtaaaagaggaaggcctcttgcagttgagttaagaggaaggcctccatctcctgcatgtcgctgggaatggaatgtctcggtgtaaaacccaatcatacattcgttctattctgagatagaagaaaactgccctgtggctgaaggcgagatatgctggcggcaatgctgctctgttacgctttgctacactgagatgtttgggtggagagaagcataaatctggcctacgtgcacatccaggcatagtgccttcccttgaacttatttatgacacagattcttttgctcacaagttttcctgctgaccttctccccattatcaccctgttctcctgccgcattcctcttgccgagatagtgaaaacagtaatcaataagtactgagggaactcagagaccggtgccggtgtgggtcctccatatgctgagcgctggttccctgggcccactgttttttctctatactttgtctctgtgtcttatttcttttctcagtctcttgtcccacctgatgagaaatacccacaggtgtggaggggctggcccccttcattgttgaagctaatgagttgactggtagctgggggcctataggtagcttcaggaaggtggctgctcactaaaaagatcaattcaggattagagttgggactttcagcccaagctccaacccctgaggaagagagaggggttgaaggttaagttgattgccaatgaccagtgatttatccaatcatgcctacacactgaatcttccataaaaacctccaaaggaatgagtttggagagcttcccaatagctgaacaggttgcagttcctcgagggtggagcacccggggagggcatgaaagtaccatgtcccttcacccatactgtcatggtttggctgtgtccccacccaaatctcatctcgtatcaaggcctaatccttcaataagagaaatcactggttgattgtctcccacaattcccacctgtcatgggagggacccagtgggaggtaattgaatcatgggggtgaatctttcctatgttgttgtcgtgatagggagtaagtctcatgagatctgatgattttataaaaaggagttcccctgcacaagttctctttcattgactgctgccatccacataagctgtgacttgctccttcttgccttctgccatgattgtgaggccttcccagccatgtggaactgtgagtccattaaatctctttcctttataaattacccagccttggatatgtctttattagcaatgtgagaacagactaatacacatgccttgtcctgtgcctctcttcatctatatcctttgtaattcttttgtaatgtcctttagaataaaccagtaaagtaagtgtttccctgagttctgtgagccactctagcaaattaatcaaattcaaggaagggttttgggaacccccaatttacagccaattgtcagaggcacaagtaaacaacttgaggcttggaattgtcattggaagtggggagcagtcatgtggggctgaatgctcaatctgtaggatctgatactatttccaggcagatagtatcagaattgaactgagttccaggatgacactcagctgatatctgcaacagaattgattgcttgcttcatgtgtggggagatactcccacatatttggttacagagagaccagaagaaaaagtttatttttctctacagaacgtcattatttggttggttggtttgcttcatcaatgaggatgcttaaaaactaagtgtagcccttgcaccattttagttgagaaagagtatgttacaacggaaaatgtaaaatttttcaaaatagacagactttagttcaaatcctggccctgaaagttagctgttaatgttgtagaatgtttattaatcattttgtgctccaattttcttaataataaaataggactgttaatattctctacagactaatatccctcctgaatatagacataaaaatttaaattcaataatatgtagaaaagataatacatcataaccaagtggggattatgccaggaatgcaaggttggtttacattttgaaaagacatagatataattcatcatattaacagattagaaaggaaaaaccatatgatcatcttaataaatgtaaaaaaggcacttgacagaatgcaacatgcattcctgatagaaactcacaaaccctaggaatagaagggacattcctcaatctgataaaggaaatttattaataaaaccaacagtttgtatcatatttaacaacgaagaatgaatactttctccctaagattggaaatcaagcaagaatatctgttttcaccactcctaatcaatattgtggtaaagattctacccatggggaaaaggcaaggaaaaaaaaagacattcatataggaaaggaagaaataagtacttccttttgtgactggcttattccttaaagatgatcattgatggagaaaatcctaaagaatctattaaacaagactattagacctaacaagtgaacttagcaaggttgcaggatacaaggtcaatattttaaaaatcaattgtatttctatatacaacgaatagttgggaattaataccttctatgatatcataaaaatgtttaggtataaatctgatgaaagatgtggagggtctatacgctgaaaactataaaacgcttctgagagaaactaaagaagccctaaataaatggagaagtataccatatttatggatcaggagactcaggattaagatgtaagttctccccaaattgatctatagattccacaaaatcccaacagtttttaaaaataaaaatggacaagccaattctctctctctctgacacacacacacacacacacacacacacacacactgcacaccacacaccacacaccacacacacactccccttttctatccatctattgggccatatgcacaaagaaagacctggactgttctatagcaaatattaactctggttatgctgatggtaggatttcagataatttgctgttttcctcttacatttttctctcttgctcaaattttgtaactgaatatttctgatgttaataaataataaatcactattccaagaaatgctcctctcacagtttggctgctttatctttgccataaataattgctaatcaatcttgaaaggacagataagtaaatactgaattgaagagtctcaaagggaatcctgcacaatatactctcaaagtactgtacaggagtcacttcaaccttaatctctttccttacatggagtaatttgggatagaatcaaccagtgatttctcttattgaaggattaggccatgttgttaataaagtggccatctagacaatgaaaacgaaataagtattctctcgtcaattcctaggtaagtgatttctggtcatttgagagtaaaaaatgctcatcaatagttttgtcactttatttaagctgccttaagagtaaggattatgtttgacccagaaaaccttaccagtgtggtcgagacctccaagagggttattgtcctcacatagcaagaaagcacgaggtaagcagtgtagggctagagtggttgcttgaccagccatgtccactgggactcagactggcttgctcttcctgctctactaatcttaacttgaggctttccttctctaaagtcgaaaaatggctgctgctgctctgtgtatgatgcccgtattgcaggcaggaagagagaaaagaaccacaaggcttttcctctcaatcttttgtgtttttgtctgggaatagatgctactctttggatttctgccaacattacattggctagaatgggtcacatggccacccttaactgcaagggagtctgggaagttggacattttaatatggccacaatggcaccacaaaaaaaaataaggtctttgttagaaaggaagaaaaaggaatgggatttgggtaggcaatcaagaggtcggctacactgtctaaaatgttgcctgtattttatttttagtttaaaagtacaaacaaaaatgcccggaaatagaagtttgatgtgcgttcttggaagaatggcatgaggagtgccacactgaagttagagcataaggccatttcctatcagtccttgggcaaaatctgagctttatttcctccacttgatatgagattaataatacataaccagtgtaaaactcacataattataagttccactggatacatgaagagtattattgttgaatattcctaaagcttcccatgagtcatggaataaaaagtgagacaacaaaaatttaattgtgcttgtttggtttttttttttttttttaaataaattggttttgtttctcagctcatttcatagacaatttgaggcagccaacaatgccaatacatatagtaaaaaataaatgtagatttttaaatggagttaaagagtaagaatcaatgtgagctaaaataagaatataagaatttttagtctaagctttctggccaccaaagtataaagggaatatagaacaatttacataatagtcattatcagagaaaaacatatctcaccagtagatgcaagttttctttattgtaaaacaaatgtttacatacttgaaatcctgtctttcaaaggtaatcctggcatttagttcagtgcctgatgaaaagaatgccctgggtaaatatttattggatggatagatccaagatctctcttctagctactttgaaatatatgactattgtcaccctactctgctattgaacattagaatttataccttctctctaactacatgtttttacccattgtccaacccatgcatagctggatagatggaaatggaataaaactctgctacatatattatgtgatttctccttattaaaaattaccattttttggagaacagggacagctttctattgaatgctataaactctctctccagaaaagtgaatatatacacagaagtctgcatatcatataaaggggctgagagattccctgaaactcatccacagatcaccttgggggctaataggtttcagctgagcaaccgtttttcatcagcagtgcaggagacagtataatgtagcaaataaaataccatccgaggcatcagacagacttgtccgaatccacttgctgtctgggtgagaaaaagaaaagttatataacctttctgagcttcagttttcataactgtaaaatgtagataaaatgcctacctcatagacttgttgggaaaatgaaatggcatagtatatttctagcacttagcatagcacttggtacatacaaagccctcaataaattaatcccaaaaaataactcccatttactgagtacttctatagggcagcaccttgatgtcattccatctttatctcaaccctgcaaatttgatcatcacatcattactccagttttatagatgaagctgaatcacaaaagttctgaaatttaccaaagctcacacagccagaaaattacagaaacagaagatgagcccaggtctttcagtaccaagaatgctaatatcaggttctgtctgtttttccagccattttcctccacttgtcttctggtagctcatatctatgactccacaaaggacagggaagaagagaagcatcacacaggccggaaaaatttaatacctactgccagacctctagtcactggtctggacttatggccaaggagtggctgacaccttgagatacacatcttatatcctcagctgtcattggtttagtggggaggctcttagtctggctaaacacagggaaagctgcagctacctctcccattaaaataatttgaaatctctttatttatttattttttttgagaaagagtctcactctgttgcccaggctggagtgcagtggcacaatctcagctcactgcaacctccgcctcctgggttcaagtgattctcctgcctcagcctcctgcgtagctgggactacagatgtgcgcaactatgcctggctaatttttgtatttttagtagagatgggggtttcactatgttggtaaggctggtctcgaactcctgacctcgtgatctgtctccctcggcctcccaaagtgcctggattacaggcatgagccaccgtgcccagccaataatttgaactctttatgccaggttagcaacccatatgtcacaatgtaattggcaactgtatcttgtagcctgcctaacatccattcccccttctagttgcctccatctcattttcttttaactatactaccttcccatgtgcctctgaaaaagtgagctctcccttctactcctgaatgggccctgattggtgaatccaatcagcacatcccatccaactggccacagtgactggctcaatgaaaaataacatgaatccagccaatggaaggttaggagaggtttactgggaacttagcaggaataaaagtgcttgatcttctcataaaactgtcaggagcagctgggcacagtggcttacacctgtaatcccagcgctttgggaggttgaggcaggaggattgcttgagcccaggaattggaggctgcagtgagctatgattgtgccactgcactccagccggggtgacagagtgagacccttaataaataaatacattaatacacaaaatttctattatagtacttttaaattacagcacatagtgtatgtatatctattacagcagttactgtatttgttcttctgacaatgtccctaagtagactactgtctacatctattgtcttaaccatttttctatgctcagggcctaacactagtagcatttaacagctagtgaagagacggatgaacacatccacatccctgccaacactgggtattttctggggtttttattatagtggccatcctgctgggtatggggtgatatctcattgtaggtttgatttacatgtctctcatggttagtcacgtggggcatcttttcagatacttgttggccattcatatatcatctttggagaaatgtgtattcaagtcctctgtccattttaaaatcacgtatcctttatttttttaaacccatctgagttgggttttttttcctcgttactaagagattccaaattgttatgttatgatgttttccatggcaagtaatagaacctcccactgaggagtctgacttttagttgtgatttttcaggcctggctgtgggaaactacaaggctgtacctggcaggccttatggggagactcccactccacaccagacctggcacagccagggcagtggcactcccaggagggagctgcgggcaaggtatcaggcccctggccggccatgctcttacatgcacctgtgttcccagccctgcaccttcattcccgggtctctgtgtccatggtcttcttcaggcacctctgccaaggcctccttatgggggaatgatatagtttggctgtgtccccacccaaatctcctcttgaattttagccccacaattcctatatgttgtgggagtgaccaggtggaggtaattaaatcatgaagatgggtctttcctttgctgttctcatgatagttaataagtctcatgagatctgatggttttataaagaggagtttgcctgcacagtttctcttctcttgtctgctaccatgggagatgtaccttttaccttccaccatgatggtgaggcctccccagccacgtggaactgtgattacactaaacctcttcctttcataaattgcccagtctggggtatgtctttatcagcagtgtgaaaacagactaatacagggaaggagggagaaaccttgaagatgcttccctgtgactctggctcagcactcagtgctttttcccactgagcccttctcccttaccccttatccccaaggtccatacaactcccggagccatttttttgggtctctgtcaacaatgaggtgaccacatctgcatgaatccactgcccctccacaggttcctgttccatgggggaaaatggacagaggagttggcacttcctctggttttagcctcttgcttgtaccattgctgtaagtgattacaggcttaaccctcattttgggcttgttgctttaattggctactcagacacctgacagctcaggtctctctctcagctcagtggagcccctgacgccattcagctgacttaaacaacaagaggagtcactcggacatgaagtccctaggcagggtggactccaggcatggtacgttagtgctgcgttctctttctccaaggttctctgtggagtcaccccactctgtgaactggcttcatcctcaggcagttagcaagatgactggcacagtccgagacccagagacatccagcaaaagacctggagctgtctcctgctcttggctctttttaagagcaaggaaaccttcttcagtggtccctggaggtttccccatgagcgtggtctgtaacttcaccacatgaatcacattaacacacaagagaaatgggaggcagagtttacccagcagggcctcaagtcaccaccgtccctaagggatgaacacctgaacatagctgaggctcaattaacaagaatgacagagggagtggattttgggtaacctaacagtaccaactgctatggcccaaatgtttgtgtctccctataaaattgtatgttgaaatgctaatccccaagggatagtattaagaaatggggcctttgggaagtgtttagaccatgagggcagggccctcttgaatgggattagtgcccttataagaagggcctgagggagcttggttgctccttccatcaagtgaggatgcaggaagaaggaactttttgtgaagaatgggccctcaccagatactgaatatgccagcactttgaggttggacttcccatgctccagaactgttagaactaaagtcctgctctgttgcccaggctggagtgcagtggcgcgatctcagttcacggcaacctctgcctcccaggctcaagtgatcctcccacctcagcctcccaagtagctgggattacagacacaccaccaagcccagctaatttttgtatttttagtagagaccgggttccaccatgttggcctggctggtctcgaactcctgacctcaagagacctcgacctcccaaagtgctgggattacaggtgtgagccaccatgctctgccagtcctagctccttaattgggaggggtcaggagcaatcacccctccccaaccctctgtgcatttgggtccagtgaggctgcacttctagccacccatcccaggggttgatgtgcggtctggacctggccaaccaggtcctcgtgactggtctggaacaaacacgtgtcctcccctgggccagaaggagtcaaccctggcactctttggaagggaaaattctctttctgctgagaggcctgggctggtggtatgggagccttgtgctgctggcagaagagaatcagcatcgaggaaagcagagacaagtcagagtcagactcccagcaacagctagtgggcatccgggaccagccaagcccaattcgccaacaaacccctccttttccttaagctgtttcagttgggcatctgtcatttacaagagaagaaattctttttaatttatacaagaaaattttattgggcaccaattatgtgccaggaactagaaatacagcaattatcacgatgggtgcagcctctgcatccacagaacttatggttatctactaggaattctgattaaggcaagcactttgtacatgccaggggttgagtttgaaaatgcatcatgttttgtattattcagaatttctttaacctccagaaagacaggggccatgaagcctgttttgcctgccccagcagctagctcagtacatggctaagtaggtgctacacaaatatttttaagtcaacaaatggactaccctaagagataagtcttcttttgctcatgaggaaattgaggtgcctaggtggtatgtgaacccaggacttttagaccccaaacccatgctccaaaatttcatgtgatactgtctcatagttgtgtttgctgcatagttaaggcatagtcctgtagtcagttcacaatgtgtaagtccactgccctgagctcactaagggcacaatcatcaccaaaatgatcgctgatgataagccagctgcgatggtaggtaggacctaccatcactgttaggtgggaccaggccaccgggactctgcagggccatcgcccgggatctttcagtccactatgtgcatttgtctgagccagacagacctgcacttgactcctgtacctactagctatgctaccttgggtgactttttttttttttttttaacaattttgtgccttggtttcctcatctgtaaagtgcagatgatactactacccaccttaaagtcatgttcatttttttactcaggaagcatttcttgagttcctaccatgtcccagttatgactagaagatgagaggcaaggagggtgagtatttgcaaagtatgcaagtcccttaggtgggttctatacatgtgagtttgagaaccactgagtccgaggctctagtaggagggtgcggtgaggttgcccaggcaatttcaggggtcagggcaatggtgtgctgggaaatgttcgacaactgggtttccaagggaaaaatgtcctgccagtttccatggtggagatgcccctatcctggccaatttcaagttgctgaatgtggagttgggaaaagatactctccactggttctccacagcagagccagcctcctccagcaccaagtggtcctagggaactctgagaagtggttggcacttttattgctggagggtaaagcaaagattccttcaagagagtgataaatggggaagagtgtagcccccagaacggcaattaacttgaggctttaccaagaggttctgcttaacttggtgcagactgagatgctgggacagctggaagatgcaaactggatgatccgtggaggctgtttggttcgggtctcagtttctctagttgggtcatctctacatggctgctttaccagaatcatgagaaagaagtcattgtttttgttttaagccactaagtcttgctgtagtttatcccacagcaacacataactacggtaagggagtttcccccggaacttagattgtcacatctaagctgtgggcttgtgcaagatcagggtagtcatctactatgtcccaatgcttagacctgtttgcaagaacatactattttcagaaagagtggcttattctcaagcacatggctatgatattgcttcctagaaaacaaaaaaagaactgcagttttttccagcagcttgccaaataattgtgcaaaattgaaagatagtaaatttctatatgtgtttgtgttcacacatacttaccaccatgcctaaaataaatgaaatcagataataaatttctctagtttatcataatcatacatcatggcccaggctgtatattggaccatccagttatttcagaagagttagttggaatgtatggacggcaaatgttggtgctcagaagaaagacataattactattttcaggttgcctggttccctatccttataatgagtaagatatttagaatcccgaactgtttatgtgacatttcaataagtaatgcagagatttgacaacatttccatattcctcttttaaagtctgaatgcctctgccttaatccaagctccttggcatttattactgtttgttacaataacaagtaagattatgagaattctaatgaaggcttccagtgaaaaactctgtgattaaaatgccataataacagttgcatgcatttatgtgcctgattaccataatctatttagcacaagtaaacatacaaacagaaggagaaaagcaagccccctgacacttcagctaaaggagaatttgaaatgtggaggagacaatgtaaatatgtaaatgtctttgtgtattctttttatctctctcctttctcatccttgccttttttttttttctgtttgctaatgagaagactatgtcatcccatgtggtctctgctttaccaggctgaggtgcatttggggccatctgctgggccagcatcctaaacaatgccacccagaaagcactggatatatttgcaaccacctttgacatcccagaatagaaaaaatggtatctcaaagactacagtctttgatgtgttcactctgaacacttagttcagctgttaccccattaatgcaaggcctggttgagcctggccacgcggtaccctgtccttcccccaccacctccctcccccgacaaacaccacattgtcaacaaattaaaagcaatcatgccaggtttctaaattagtctctctctgtatctctgctggcttcattatttttaattcttaataaaatgtcaggcaggagactgactcgcatcttccacttggtatgagattttaaagaactttttaaaatgtggaactgaatactggaattttaaagtaggataatggtgacaatttcatttgggaagtaacttaaagaaattgctggaatcccaaacattttgtagtaaggagacagcataggcatgttcttttttcaaagaaggaaataatttctttaaacagaagcaggcaggtagctgatctagcctcaatgcggagagatggactgaggaaatgtacgtgaaacaagcatgggagagtttatagagtattagagaaatactaagcctagtagtttaatacaactgaggcctaaagatagccatgttagctcttgcttattaattttttttgttttccaaaaacaatcttgaggcatgtaaaaaaaaaaaatcctgaaatatccatatatagggagcccttagagtgaaattcgttgagcttttactatgtcccaggcactgttctacatgctttccccatattatcaaatttgacactcataataaattgtaaggaagacactgttacagatgaggaaaccgagacatagacgttaagtagctcactcagaatggcattagtttaataagtgaggaaatcagaattctaactcaggcaacctcaatccagagcctgcactcttaaacagaaagctaattttcaattttgtattctccagagtttaaggatcgtatgtcttcgtggaaaactatatatcctaagagaaatgatacagcatagtgcctgatacatagtaatccggcaagatatgctggcattaatatgataacaaaaatcacattattcacatcattaggagagactattgtttccagtcccacacatttctaacacacattgatgtgcatttttccaattaaaataatcttaaagaaaggaggccagggggggtacacaaaagtaagaacgcgtattgctaaaagcaaaacagcccattgtttgaccatccagctccgcacttacctgcccatatggtggctcctggaagccagcatgctaagcaccatgtgtaccaaataatcacaggggtaggttaaagagacagccttccccctaatttgaccaatttagcatttggggagtagtctgtctgtgcctatcttgggaatttttaaacaatgggttgaaagagaaattaggggaggcagacaatatttcggaatcaacctaataaatgtgaacagctgcaatgcgatcatcagcacaatacatgatggttcctttctccaagaaaataaatgtgcgcctccccgggggtctgtcctctgccaccctcctctactcgcagtatgctttccgcttgcactgatgtgcccttgtgcctcccttcagcccttggcttgaagccctggactagatcaaccagagaacgggcatccccactgggtgctcctcctgtgtctccccttcaactcatccaaacagaaactcttcctcttggattctccatcacagttgatgagatggggcaccctcatccgtccagctgctcaggcttagaaaactaacaaagtcctccactactctgcaccctcacttgtctatacggagccattcatcaaagtttgccaatttcacctcctaaaaatgtcttccatccctcccctcttctccatgaggggagtctgccactgcccaaggttggagtctgcatttgtctgctagggctgccatgacaaagtagcacagaccgggtggcttaaacagcagaaatgtattgtctcacaattctggaggctggaagcctgagatgaaggtgtcagcagggttggtttcttctgaggcctctctccttggcttgtggatggccgtcttctccatgtgtcttcacatggtctcccctctgtgtgtgtctgtgtcctaatctcttcctcttataaggacactagtcatattaagggcccaccccaatgacctcattttaatttaattacatctttaaagacctatgtccaaatacagtcacattcttaggtactaggagttaggacttaaacataccaatttgggtcagggaaacacagctcaatccataacagggtccttatcatctctcaccttgactaccatgaaaccttgtatttactaagctttctacaatgatcagatcctgtattttccatatttcctaccaaggaccatgtatgacttctattaccagaaaaatactcatcaatgaaatattttgaagaaaatggtggtgttctccttccaattcagagacttctccttggccactgtctgttctgctttaagcttctcctttgtcgtgtttctccatgttccatcccctggcctcaaatctgggttctcctcttctgtttccttttctcaggctggtgagtcagctggacagtcatctgagtctggagttggggccaacttctttggcatcacattccagacaacagaaacactgatgagcacagggcatctgaatggggccgtgagtcattgtttgtagtttgtcaggtgatatggtttgtatatttgctcccaccaaacctcatgttgcaatttgatcctcagtgttggaggtggagcctggtgggaggtgttcagatcatgggtcatgggggcagatccctcattgaatgtcttggtaccatcttctcggtaatgaatgagttctcactctattggttcctatgataaccaattgttaaaaaagagcttggacctctctcctcctctctcttcttccttcctctctggctgtgtgatgcctgctctccttcaccttttgccgtgattggaagcttcctgaggccctcaccagaagcagatgctggcaccacacttcttgtacagcctgcagaaccatgagccaaataaacctctttccttcataaatgacccagcctcaggtgtttctttatagcaacacaaactaagacatcagggaagagtgagaactattttgaaattgaaacatggatgtatgttcttcaatgcacattgtgggtttcatggaattttattctaattctgcaacttggaacacttttgtccacaccccgttctggggaggtaatggggccatggaaccctttctgtgtccatccatatttcagccctccaggaggctttgccaggcaagttatacctcactctggatgagcctctggacatcaagagacatcaatggtgccaaagcaccatactagatttcaacagaggcagcatgcatggcccttcagagaatgaaggctggatcctggtccctgacatagagaccctaaagcactctctcatctcaccgttcagaatatgtggatcacccccttggagagttctggccctcaggaaacttacacctaccatctaaagttctacacttctaccctgactcccacactccataaaaccagggagatggagccccagctgcactgtctcagtcagggtcccagcaggaaatagcatacccaagttaggatacttggaaaggggctaattgacaaagggactcattaccacaatggagccagcatgtagagaagccacaagagatagtacaggggtcagaagctagcagagccagagctgtccccaaagaacaatgggagggagaattttccagaacccagaggaaagagttgtgcagaaaaggctgccttggaagtaaccatgacctagtactggggacatagctaagctgcagtagacatgacagggaggaagccaaggagacaaatgcctcagtctcctccccgcaccaggttgactgagcccaactggaggaatccaggagcagagcgtggggtggaggcagaggagagtgaacccaccagagaggtgaggctgaaggcactcgcctctccatcatcactgagtctgctgcgctgtctcgcctccaactggtggctgagtctttactctggaggcgcttcctagcattgccataacaaactgctaccaacttcatagtttaatacatggatatttattgtctcatagctctggaggccagaagttcaaaagcaaggtgttggccggagcgcatttcctctgaaggctttaatggagaatccttcctcgcttcttccagactctggtggcctcaggcattcctcggcctgctgctgcatcacctccatctctgcccccatctggccttctcctcctggctgcatcttctcatcttctgtctgtctcaaatctccctctgcctttctcttataaagacacttgtcattggatttagggcctgcctggtaatccaggatgatctcatctcaagatccttaacttaatgacatctgcaaagacccgttgtccaaacaagggcacattcacaagttctggggatctgcacatattttttttaggggggtgcaccattcaacccaggacaaggggcaagtctcttaatccttggaaaacagtcctggaaggaagccccacactatcagaagacctgctgactcctgctcaaatccatgccctggacctccaagggctctgcaccgcccccaacgcccccccaatccccgcaaaaggagactcaggtggcaggtcctgcctgaatcattgtcagtataaggggcctagggcagtttatgggccatgtcagctcctaggagaagatctgtccagtgctgaaagtagggtgttaaagtctccagcaattgttgtactggggtatagaccccagtacatctgactggggtctatctctctctatatatagagagaaatctctctctatctctaataatatttactttatatccctggttgctccagtgttgggtgcatatatatttacaattgttatatcctcttgctgaactgacccctttacgttatgctacctgccaacccatgccacccacttcacatcagctgtctgctaggagctctgcctacgctgtccctcgctgagacatgttaacctcagctgccagccctaggcccaagacccaataactatgctggaggtgacgatgacctcccagatcttttccagaaacatcccccactgcttcagggcattcacagctaaaggtatacttggtcagagcagctaaaggtatacttccaaagtgaatcaatagcagtaggaaaacgtagttcctagcatttaagatagtggttcctcagtgtgacagagattgctgggtttttaccccaatattcattctcctctatttttaccattctatttcctaatgggctccaattggtggcacctggccatgcatctaaagactacacttcccagccttacttggctttaggtgtcgccatgtgactaagcactggccaatgggatgtgagtagaagtgatacacgcagcctctgggccctaccttaagagaaggtggtgtgccctctacttccccctcttcccactgttgactggaatgcatacatgatggtgggagtcacagcagccatcagcacaagagaggaaaggcaacacaggatggatgccaatgcaacaagataaaaagacactgtggagccactgtctgggctgagggatgctccatacaggctgttacatgacagagaaatgttggcacagctgttaagctgacatgagggttcgtggctaagtgatctatcaataaaaatacttccagtggaggctgctaagggagttggcgggtgtggggggaaactaagccagagaggaagccaagaaagactgaaatctcaggcaaaagtcctgctaaagagactgggcttctgactgaacccacaagggatctctagagtaaaaattatgccttggcccagagctacaaaaccttgcaccatcattgcattcagctctctccatagtcagcaaagtatccccaggagtccacgcacagccctgtgaagatgagttgaaaatgttggccattgagagagaaagcacaccaaagcctaaaggcatgcatggaaagggttaaaagggactgaagcagatgtgtctggacagatgtctttgttacgctcaaaagcataaaacgaaaagaaagagtgaagaggcaaccaggacctacaacatctgctacgtaagttggcctagggtgaatcctgatcaccacacccacttcctgcctggcttcacgagtgaccagaacatgcccactcacccttcccttacagcatcctctaaagtgagggatagcctcctaatattgcaatattgtgtgaacctggagttttgttatgattctgcccagagtagcattcaggattcaaactcagttgatataacaaagacatctgcagcagacagttacccctccagacatccaaaagtccccactcagagttcaaaagtctgttacctttggttagtatttggtttcagtgcattataaaaaccaacatgatggctttaacaaagcagaagggtttgttctctcatctaagagaccaaagcattggtccccagcaggtctggcacccatagtatcagcgacccaggttccttctcttttcatgctcttttatatgtggccccacagccaacttatgatcctcaatgactcctccagcctccaccatcacggaggttggggttctgcctagctgggagatgagaatggaatgagaagaacatgctgtctctggaaggatagctctggaagttgcccatgccacttctgtttacttcctactggccagaacttggtcacaaaagaggctgggaaatgtaaggagtctgggatatgtagttttaattccaggtggccacatgccaaaccaaaaagcctatttctacatagaaagtggaacagatttggaggaacaatcagcgatgtttgccatgccgccatatgaccaggaaacccttgtgttaatcacatgcactctaaccacctctcagggctgtggagggaatcaaagaaattgtaataattgtgatcacaattacttcgagcataaagtttgagagcagagatgctgcaggacctcagcacctatgacagttcatggcacaggaaaggagctcaataaacatcgattgaattatttacttaaaacataaatattcctcagcagatataatgcattgacgcacctgggctgctttgctcaactccttggaaaagtcgctggtaaatctttggaaggattggaaatggttccagatgttgaaatcatttgtaatttgtagcattgatgttttgaggagggaagtgacactttattattctcccctgtagcgccaccgtggtcagtctcgtcacctattctgacatccaaattagaaatcatcttttccctggactcaggaaaataaaagttgagcatttaaattagccatcaggcagtctctcttatacactgcaacataaatggggacaacaacggttaagtgacaatttggtaacatctaccaaaattacaatgcacagattatgtggcccagtaatgctaattccagggatttatccttatgatatactacatatttacacctgtgcaaatgaaaatttgccaggtatttcatgggagcattgtttgtaatactaaaaagctggacaggccactagctgtcaattaaacctataatgtgttgggattccagctagctgggagatgagaatggaatgagagggacatgctctctctcttgaaggatgccaagaatgaagagagaaggaccctgggtccctgacactatgggtgccagacctgctgggaacaaatgctctggtctcttagatgagagaacaaacccttctgctttgttaaacctatgtttattattgacagcaagtggcccatcgaaagacattatggcatgcccatattacaaaaggatggaaatatttttaaggaagaaacttttaacagacagctacaaagccatctccaagacactaactggataaaagcaagatggagaacagtgtgcatagtatgttaccatttgtataaaaaggggaacagagtgtatatgtttacatttgcttctatttgcatagaatacctctggaaggacagacaaaagagtaactgagcaagagaactgggtggctgggggaacaagtgtagtaaacaaactttgcattatatgtttttgaattttgaactatgtaaatatatcacatattcaaaaataatcaaacaaaaaataatagctcattagcttcatctagtggtcttatatatattctttaaaatatgtctgtctagatccctctgattgattgccctacaaataggagagaagaaatactactgtttttgcaattacagtaggaaaaagtggacccatctgtacatttcaggcagtgcctaaaagtactggggccagcttagagaagtttattcagtgcaggaagcaccctgatctcccatcatctggggcacagactgtcctagcttctctgtgactgaggcaagaaaaaaaaaaaagcaccataaagagccaggtagctttttttgaggttgggggggtggggcagtgggaaggtcctagttttgattgggcaaataatttttcctgcacctgtgaccaatctggtgaggatgtttgagaaacaattcttttttttggagacagtctcactctgtcacccaggctagagtgaagtgacatgacctcggctcattgcaacctctgcctcttgggttcaagcgattctcctgctccagcctcctgggtagctgagattataggctcccaccaccacgcccggctaatttttgtatttttagtagagacagggtttcaccatgttggccaggctggtcttgaactcctgacctcaggtgattcgcctgcctcggcctcccaaagtgctgggattacaggcgtgagccaccgcaccctgccctgaggaaaaaatgtattctatgtattctaaatatgggctgcaggtatgtgtgtgtgtgtttgtaggtttagaaagagagcattctctattcagtggagagagcaaggtacagaaacaacagtggacagagcatgccaccatttgtgtgaaaaaagaagagaaagagagatctttaaatatactttgtacttgtgaagaatatttatagaatacacaagaaactgtaacagtagttgcctctgggggtctgggggaaggagatcagttgtaccagggagacttacttttaatcaaataacctgtctactattggagttttacttcaggtacgtgctgcacagcagctattcaagacatgttttaaagagaagggaatttcagtttatatgatgtccttccatcccctccttctttccttcctcccttcctttccttccttccttcctgccttccttccttccttccactctccctccgtccctcaacccccctttcttttttatttctttcttagtgcaaactgtaaacaccgcctaaacagaatggcctctttgcttagacaaatgccttcgattcaacctagaagcagatgaccttttgttgttgttgttgttggaagtggggaaagaaaaaaggaatcaatgtctaaaactcccacactttgcaaagtcacagaacccaagttctgcctggtcacaactgcagtcaaggaatgtcttgctcccaccttaaagtcattcttcctggagccaacgaagtcacttaaagaccagtgggctcagctttccacacacacctgcctcttctttgggcaaagtgggaaccaattcttccctctgtatctgcagggaaagactctgcaaaggagagcgagctctgggcgcagagcgccaaagggcccaggaggagagcacgccttccgttcttgtcaggagggggccctgaccccagggtcttcccagcacaaccatccacacagtggaaacagatttcagggggtccagctctggccagtttttcagggctgaacgagccctgggcaaaggagaggaaggtctaaaagggattgaatggtgcagccctacactgttaaaggggattgggtggatcttgtttttatatgggaagacatctaagaggtgctgagaaatgaaataaagcaggttacaaagtttgtatacaaccaggctggaagggcattcatcaaaatcttgacagtggtttgctgggaggggcagaggtgttgaaatggtaatggtgacgtttgctttctgtatcatttcaaagttttggtttgtttttgtttataatgcacatgcatgtttttaacagcatgcttactgaatgttatttcacaggtggtcaaggggtttgaaggcacgactattcatatgatttgggagaggttgctgaatctccaggagatacccttgtgagcttcagactggggtctgtgtctgggactggaagaccccaggacattggagagaggagcaaagcctagagcatgagccccagaagacgccactgtgccggtgcaccacctggggactttggcttatgtggattctgtttcagtagatctgggtgggatcgagatcttttatttccaaccaacacccacgtcccaggacctcactggaaagaggcgggcgggcgcggggagccttcctgaggttcctggttctcaagagccgggtgtaaggaaggaaaatcaaagattgaatttagatgtatgtattggaggggaatattggaggaagggggagcaggggagcacgcccagcctcctctcctgtctttcccgcccccttgtctaaactcaaaaccgagtccgggcgcgccttgcagggcgcccgagctctgcagcggcgttgcgggctgaacccatccggcacaaactgcgggccactggcccctcacacctgggagtttgcggcgctggcctgcagcccggggcccacgtggcggaagctttcccgggcgcgcgctgcgcagccccgcggggccggggagacaccgctcgggagtcctccgctcggctgcagaatctttatcagctgcactttaccgcagccctggctaggacgctaggcggtggagcgccctatccaggtgcgccgccgcaccatggatcaccgcgcccggtcccgcagtcccgccatggcctggggaggcccgaagcccggggacagtggccggcccatctccggctccgcggacccccggctcaggcgggagggcaggcgggtccctgcaggcccccagggagcccgggagcctctctctggcgtcattcagtcccggggcaacctgaagcgcggtagatattggagagggggcgtctgttggggggacctggcgtcattactgatggctagcagggaggagggaacgggttgtcacctcggcctcataaggccgtgagtgagtagtccagggcctcttcaggcatttttgaaactggattaactaggggggaaattgtagcactgaagccaccgtgactgtcttttgcgctgtgtggaaactccggtaaaactctttgggcaacagtcttatcaccagctcttcaacgtgtgcagcccttctggtcctgtccctgttctgggccccaggaatgcaaagcaggtccaggcactgtgaagaccctggcggtggaggaagaggcttcccggctgtggaggaagccagacccttacaacacaagacgagaaccagacctgcgtgggggagctctggatgctacaggggctcaaggaggggtggaggggccttcccaggccaacccctgaacggcttggacaagatgctcagatggacgggaggaacggcgtgtgggatgggggagctggaggcgggtgggtgggggggggaggatggggaaagcgctggcccacccagtgtgggaggggtagaggaaaagcccgcaggggccaggttgggaccccgtaggccgggttagagggcttggacttgatcctgacaggcgacagggagacatattgctacttattatgtgcacagtggccagatctctaaagaaaacaccatcccccacccccaccccccatatagtaaaccaggtggtccgcccagtgctcccagggaggtgatgggaaatcccactccataccctgcggtgaggggttccatgccctccacgtgtgcaactactccgggcccagggaaacactgggccccatccggtaacccccggcccagtcgggtttcccagttcacattataaccaaacggtcttgccagctagacagacagacacccctgacctgtttaccctgatcctctgctctcaggattaatcacaacttgtcgaagggggtggcttccagtggggtggaccgctctgtcaatgccagcgtgtgtctagcatctcctggggtgggggtgtggggaagggaggtgtaggatgaagccctagaagcctcaggcaattgtgatccggtgggctggatactgaagcccacccctgccttgacctcaattttcagtatcttcatctgtaaaatgggaacaacctgccttcctcctagccctaaaggggctgctgtcaagattggctgagatagctgtttgcaagctgagctcaatgaaagttcattgtgtccccctcagtcctatcccaatatcgtctcactgcaaaggtggggggcagcttaacttcaagggcacttcaaggatagccaggtggctgtcagcccagctttccaggatgggagcaggatcttgacagaagggttgactgggaggggcagttgctggtttgggcttcgttaggttgcatttttgtttgttgtcctttcatttccctggggcagcaccccttcctgcaagctccaggccttcctctggaatgctcctagagcccaacctctgctggtgcctgagcttaagccaggccagctaaggggatcctggattcacacggcctcacagtcactcagattgttagcagaagacaaaaattacaaggggagggcgtcatgtgattcttacacaccctccaaatccagcagacaccttggaagccacaggtagcttcaagaaacccattttacggatgagaacctgagatggagaaaggacaactggagatctctgagtctctgagcccacactccctacctccctgcacctccaggcactctgctggcaggatcttgggcaaatgcccacagctctctgagagtcagttttcctgtctgtaaaatgggagtcataccttcctcctatggccggtgagagactaaattaaactatgtctgtcaagacacctgaaactcctggcacaatttaggttgccttcaagtggtcacagttgtcattaggtggaagtcaacaccccaatcattgtaaaggtgcccatataccccaagatccagattacagctctcacagtttattatatacagcgaaaaaacacataacacacctttgcccacatttacatgtattttacggaccatgtttcacatcagtccgcatgcacatctgcacgtgtgtgcattcggcagtatttaccaagcacctgccaagtgccagggcctgtcctccgcacccggcgtgaactgtcctggaccagtcccgggagccgcggttctgaccagccgtgctgaccctggacgactccatgagctgttttgtgagaaagacacgccatttgtttgcagagttctgacttctgaggggtcatgtagcacatgtttggtagccaaacgctgtcattcacgaccaggagcgatggctgcaatgcctttttctttgctttgctttccggtgccgggagccttgcctcccgccgccacccctggtcagctctgcgcaagaacgtcgttctgtttggcagccaggccgagacgcagcctgaatgtgagcaggaactcggagaagggaagggagagaatcagaaagaaggcccgggagggacccgggaagcagtgggaggtctgcgccctggagccccgcgagagcccgccggtttggcacgggctcctcccgggccgcccggcggtccaacaaaggccggccccgacacgcacccggtcttttgtgggagagaaacacaaagaagagggaaaaacacggaggaggccaacagcaccaggacgcgggggccaaccaggaactcccggagccggggcccattagcctctgcaaatgagcactccattccccaggaaggggccccagctgcgcgcgctggtgggaaccgcagtgcctgggacccgcccaggtcgcccaccccgggcgccgggcgcaggacccggacaagtcctggggacgcctccaggacgcaccagggcaagcttgggcaccgggatctaatttctagttattcctgggacggggtggggaggcataggagacacaccgagaggtactcagcatccgattggcaccagggccaagggagcccaggggcgacacagacctccccgacctcccaagctactccggcgacgggaggatgttgagggaagcctgccaggtgaagaaggggccagcagcagcacagagcttccgactttgccttccaggctctagactcgcgccatgccaagacgggcccctcgactttcacccctgactcccaactccagccactggaccgagcgcgcaaagaacctgagaccgcttgctctcaccgccgcaagtcggtcgcaggacagacaccagtgggcagcaacaaaaaaagaaaccgggttccgggacacgtgccggcggctggactaacctcagcggctgcaaccaaggagcgcgcacgttgcgcctgctggtgtttattagctacactggcaggcgcacaactccgcgccccgactggtggccccacagcgcgcaccacacatggcctcgctgctgttggcggggtaggcccgaaggaggcatctacaaatgcccgagccctttctgatccccacccccccgctccctgcgtcgtccgagtgacagattctactaattgaacggttatgggtcatccttgtaaccgttggacgacataacaccacgcttcagttcttcatgttttaaatacatatttaacggatggctgcagagccagctgggaaacacgcggattgaaaaataatgctccagaaggcacgagactggggcgaaggcgagagcgggctgggcttctagcggagaccgcagagggagacatatctcagaactaggggcaataacgtgggtttctctttgtatttgtttattttgtaactttgctacttgaagaccaattatttactatgctaatttgtttgcttgtttttaaaaccgtacttgcacagtaaaagttccccaacaacggaagtaacccgacgttcctcacactccctaggagactgtgtgcgtgtgtgcccgcgcgtgcgctcacagtgtcaagtgctagcatccgagatctgcagaaacaaatgtctgaattcgaaatgtatgggtgtgagaaattcagctcggggaagagattagggactgggggagacaggtggctgcctgtactataaggaaccgccaacgccagcatctgtagtccaagcagggctgctctgtaaaggcttagcaattttttctgtaggcttgctgcacacggtctctggcttttcccatctgtaaaatgggtgaatgcatccgtacctcagctacctccgtgaggtgcttctccagttcgggcttaattcctcatcgtcaagagttttcaggtttcagagccagcctgcaatcggtaaaacatgtcccaacgcggtcgcgagtggttccatctcgctgtctggcccacagcgtggagaagccttgcccaggcctgaaacttctctttgcagttccagaaagcaggcgactgggacggaaggctctttgctaaccttttacagcggagccctgcttggactacagatgccagcgttgcccctgccccaaggcgtgtggtgatcacaaagacgacactgaaaatacttactatcatccggctcccctgctaataaatggaggggtgtttaactacaggcacgaccctgcccttgtgctagcgcggttaccgtgcggaaataactcgtccctgtacccacaccatcctcaacctaaaggagagttgtgaattctttcaaaacactcttctggagtccgtcccctccctccttgcccgccctctacccctcaagtccctgcccccagctgggggcgctaccggctgccgtcggagctgcagccacggccatctcctagacgcgcgagtagagcaccaagatagtggggactttgtgcctgggcatcgtttacatttggggcgccaaatgcccacgtgttgatgaaaccagtgagatgggaacaggcggcgggaaaccagacagaggaagagctagggaggagaccccagccccggatcctgggtcgccagggttttccgcgcgcatcccaaaaggtgcggctgcgtggggcatcaggttagtttgttagactctgcagagtctccaaaccatcccatcccccaacctgactctgtggtggccgtattttttacagaaatttgaccacgttccctttctcccttggtcccaagcgcgctcagccctccctccatcccccttgagccgcccttctcctccccctcgcctcctcgggtccctcctccagtccctccccaagaatctcccggccacgggcgcccattggttgtgcgcagggaggaggcgtgtgcccggcctggcgagtttcattgagcggaattagcccggatgacatcagcttcccagccccccggcgggcccagctcattggcgaggcagcccctccaggacacgcacattgttccccgcccccgcccccgccaccgctgccgccgtcgccgctgccaccgggctataaaaaccggccgagcccctaaaggtgcggatgcttattatagatcgacgcgacaccagcgcccggtgccaggttctcccctgaggcttttcggagcgagctcctcaaatcgcatccagagtaagtgtccccgccccacagcagccgcagcctagatcccagggacagactctcctcaactcggctgtgacccagaatgctccgatacagggggtctggatccctactctgcgggccatttctccagagcgactttgctcttctgtcctccccacactcaccgctgcatctccctcaccaaaagcgagaagtcggagcgacaacagctctttctgcccaagccccagtcagctggtgagctccccgtggtctccagatgcagcacatggactctgggccccgcgccggctctgggtgcatgtgcgtgtgcgtgtgtttgctgcgtggtgtcgatggagataaggtggatccgtttgaggaaccaaatcattagttctctatctagatctccattctccccaaagaaaggccctcacttcccactcgtttattccagcccgggggctcagttttcccacacctaactgaaagcccgaagcctctagaatgccacccgcaccccgagggtcaccaacgctccctgaaataacctgttgcatgagagcagaggggagatagagagagcttaattataggtacccgcgtgcagctaaaaggagggccagagatagtagcgagggggacgaggagccacgggccacctgtgccgggaccccgcgctgtggtactgcggtgcaggcgggagcagcttttctgtctctcactgactcactctctctctctctccctctctctctctctcattctctctcttttctcctcctctcctggaagttttcgggtccgagggaaggaggaccctgcgaaagctgcgacgactatcttcccctggggccatggactcggacgccagcctggtgtccagccgcccgtcgtcgccagagcccgatgacctttttctgccggcccggagtaagggcagcagcggcagcgccttcactgggggcaccgtgtcctcgtccaccccgagtgactgcccgccggagctgagcgccgagctgcgcggcgctatgggctctgcgggcgcgcatcctggggacaagctaggaggcagtggcttcaagtcatcctcgtccagcacctcgtcgtctacgtcgtcggcggctgcgtcgtccaccaagaaggacaagaagcaaatgacagagccggagctgcagcagctgcgtctcaagatcaacagccgcgagcgcaagcgcatgcacgacctcaacatcgccatggatggcctccgcgaggtcatgccgtacgcacacggcccttcggtgcgcaagctttccaagatcgccacgctgctgctggcgcgcaactacatcctcatgctcaccaactcgctggaggagatgaagcgactggtgagcgagatctacgggggccaccacgctggcttccacccgtcggcctgcggcggcctggcgcactccgcgcccctgcccgccgccaccgcgcacccggcagcagcagcgcacgccgcacatcaccccgcggtgcaccaccccatcctgccgcccgccgccgcagcggctgctgccgccgctgcagccgcggctgtgtccagcgcctctctgcccggatccgggctgccgtcggtcggctccatccgtccaccgcacggcctactcaagtctccgtctgctgccgcggccgccccgctggggggcgggggcggcggcagtggggcgagcgggggcttccagcactggggcggcatgccctgcccctgcagcatgtgccaggtgccgccgccgcaccaccacgtgtcggctatgggcgccggcagcctgccgcgcctcacctccgacgccaagtgagccgactggcgccggcgcgttctggcgacaggggagccaggggccgcggggaagcgaggactggcctgcgctgggctcgggagctctgtcgcgaggaggggcgcaggaccatggactgggggtggggcatggtggggattccagcatctgcgaacccaagcaatgggggcgcccacagagcagtggggagtgaggggatgttctctccgggacctgatcgagcgctgtctggctttaacctgagctggtccagtagacatcgttttatgaaaaggtaccgctgtgtgcattcctcactagaactcatccgacccccgacccccacctccgggaaaagattctaaaaacttctttccctgagagcgtggcctgacttgcagactcggcttgggcagcacttcggggggggagggggtgttatgggagggggacacattggggccttgctcctcttcctcctttcttggcgggtgggagactccgggtagccgcactgcagaagcaacagcccgaccgcgccctccagggtcgtccctggcccaaggccaggggccacaagttagttggaagccggcgttcggtatcagaagcgctgatggtcatatccaatctcaatatctgggtcaatccacaccctcttagaactgtggccgttcctccctgtctctcgttgatttgggagaatatggttttctaataaatctgtggatgttccttcttcaacagtatgagcaagtttatagacattcagagtagaaccacttgtggattggaataacccaaaactgccgatttcaggggcgggtgcattgtagttattattttaaaatagaaactaccccaccgactcatctttccttctctaagcacaaagtgatttggttattttggtacctgagaacgtaacagaattaaaaggcagttgctgtggaaacagtttgggttatttgggggttctgttggctttttaaaattttcttttttggatgtgtaaatttatcaatgatgaggtaagtgcgcaatgctaagctgtttgctcacgtgactgccagccccatcggagtctaagccggctttcctctattttggtttatttttgccacgtttaacacaaatggtaaactcctccacgtgcttcctgcgttccgtgcaagccgcctcggcgctgcctgcgttgcaaactgggctttgtagcgtctgccgtgtaacacccttcctctgatcgcaccgcccctcgcagagagtgtatcatctgttttatttttgtaaaaacaaagtgctaaataatatttattacttgtttggttgcaaaaacggaataaatgactgagtgttgagattttaaataaaatttaaagtaaagtcgggggatttccatccgtgtgccaccccgaaaaggggttcaggacgcgataccttgggaccggatttggggatcgttcccccagtttggcactagagacacacatgcattatctttcaaacatgttccgggcaaatcctccgggtctttttcacaacttgcttgtccttatttttattttctgacgcctaacccggaactgcctttctcttcagttgagtattgagctcctttataagcagacatttccttcccggagcatcggactttgggacttgcagggtgagggctgcgcctttggctgggggtctgggctctcaggagtcctctactgctcgatttttagatttttatttcctttctgctcagaggcggtctcccgtcaccaccttccccctgcgggtttccttggcttcagctgcggacctggattctgcggagccgtagcgttcccagcaaagcgcttggggagtgcttggtgcagaatctactaacccttccattccttttcagccatctccactaccctcccccagcggccacccccgccttgagctgcaaaggatcaggtgctccgcacctctggaggagcactggcagcgctttggcctctgtgctctttcctggggtcacctctgtctcctcttggccattgggttctcacaatccaaacccgcgatgcaaatttaggatgtggctgtgaagagagattctgggtggaaataaaaatactttggccttcctggtcaaggaccagggcagatcctgttgtagtctccgtgccccagggctggcctgagaatgagcccctgaaaagacagcgggtacgggcaccgtaagaacatcccctggtccagggtcctctctctgacaatatttttggtggccactggccaccctggaactgggggtgcagaagatttccccagtcagaaccccatttcttgagtcgcatagctgagcctggctcacacaggcaggcaccctttgcttagacttaaagactgctccgtcccctagcaagggacaggcacttcctgctcctccagcagggaatgtcggactgctggccagaacagcagtggcccagggattgggtgctggaggcctagtttttcaccgatgggcctggctttttgcaaaggctgggagggatttggagaggctgagcagctgggggctgaagacgggtggaaagcctcctgcccccaccaccccaacagcgccatgtgaatccaagaagaaggaagggcagggtgtagtcgtttttattctgaaatcccatttgaaatgaaacttgaaaagaattcaaaactgggtccagctgcagccacagacacactcagagggactccaggaggctggaacgtagaccagtgggcgctgagaacctggccggtgggggtaggggtcttgattgcagttttggctcttccacacccactgccaggcaggtgtactggtgcaggctctgagtgtgcttggtgtctgcatagaaggacggttgttgaaaggcaataaatcaagtctttccctccacccctgcacccaagctttcagtagcaaccagccaccagccaggccaggcaagaccagggcctctgaagaaggaggggctgtgtccagccaggctttgggccctcctccatgccagccgcctaaactgtgcacccagctggaggccttgaccacggtgggtgagactggagcagctctggacgtggaggaggaagacactggcacacagtgcacatcccctagaacaggtggctactcgccgagggtggccctggactggtgggggccaaggtagaggactcagccagtggctgggctttgatgtagggcaggagaagactgtgtgcaaccactttgactttggtgggctcttcattggcagtgggctcctcaccaagtagggaagggaaagaggtaactgtttccgggatctgctgcagtcttccctgccacactgcagtcccctctggggagcattcgttgggagattctcaacaggctggactgcagctcagcctcctccccagccccactgcgtggctctgcagcaccccagctgtcagcctccgagtttagaaactcaccatgccccaggtctttgagactccccaaccctccttaagaacctgggagctggccggggcgcagtggctcaagcctgtaatcccagcactgtgggaggccgaggtgggcagaccacctgaggttgggagttagagaccagcctgatcaaaatgcagaaactccgtctctattaaacatacaaaattagccagatgtggtggcacatgcctgtgatcccagctacttggcaggctgaggcaggagaagtgcttgtacccaggaggcggaggttgcaataagctgagatagtgccattgtactttgcactccagcctgagcaacaagagtgagactctgactaaaaaaaaagagaaaaaataaaaaaagaacttgggagctcagctgaccagaggttgaggggccagtgggcagaacccgagcctcctcctctggcctcagcaccccagggcattgtccctgggctcctcactctctcatatgggcaggagccacagagaaatgacactcccctggactcagtgttgaaggactaacccctaatgcccatggagttggaattctgcaccttggggacaggcagtgagcagacgagtgaagtgaacccacagaggtgtcacactcccagtgaggccaggagttttaatgtgaccgcaggaagacatgggtactaaagacacccgtggtgatttggggttctgacagccatccaccagggacctgcccttctcattcccagactgggatcagtgaggagcccctgggccagggcattgaattttaaagccccctagatgctcttatggataaaactaccccagtggtggaaaatgtctgtctcctattggggccgaatctacctagcaatctgtctggacttctattgagtattcaccttgatgcttcctaaaagttcatcaggaggtggcaaaggagtcccccttcacctgccatgtcattttaagtcactcttgcattacagattttgtgcctagtatcccccttccccacacaagtgcccccatagtaccagcaggggttatagggtctttgacaagggccccacaccaagagtgaccatttatttagtctccgcaaaactgtaagggaagccaggataaagccaggttattcacagcagtggttgctgtattcagtcccatcctgactagggagagggacgtgggacagcatgggtgagcatggccactccctggtttggaggcagccagcagctcatgggctatatcccagggctaagccccaactccctgtaagtgaggaggccattctaggcagggcagagatggggatcacccacagctacatccttactccgtatctctcctctagggccccagtgattgctactggctgtttgtctgtggaagaggttggaggtggaggactgcagcgaggaactgaagaggcaaagctgggaggagggagtcagggccgggctgaatctccagggaactcaggatattaataggtggaggctaggagaggaggcggatagcgttgactgaggtttagccggggtaaggcggggcacagagagctttaagagcctcagttcattccattctcactacaaccatttgaggagggtgctattattgtcccgtcttacaagtaaggaaactgagtcacagaaaggctaagtgacttgctcaggggacacagccagtaaatgaaggtggcaaggttgttgtaatccagggcccaccccaagaggccacctggcccgcactccagcagtccccagactctggctcagctgccgccccgggaatcctctgctgccaccccctgtcccccaccccggcccccttaggtggcgctcctagtgcttccccccatgcctggaccccatctgtccccgactcccccatctgggcggcgggcggggctcacaggctttagcaattagcgggcgcgggtgggcgcgcggcgcgggcggaggaagggccggagcaggtgagccgcggcggagcctcattagggcggcccgcacgccccgcgagggaccgtcgttagtgccaagacagctgccgctcctgccggcctagggccgcagccggaatcccgggccacatcccctgccccgttgtgccttccacacctcgggcagtcactaggaaaagggtcgccaactgaaaggcctgcaggaaccaggatgatacctgcgccagtcccgcggctgctgcgagtgcgcgctctcctgccagggggacctcagaccctcctttacagcacaccgagggccctgcagacacgcgagcgggccttcagtttgcaaaccctgaaagcgggcgcggtccaccaggacgatctggcagggctctgggtgaggaggccgcgtctttatttggggtcctcgggcagccacgttgcagctctgggggaagactgcttaaggaacccgctctgaactgcgcgctggtgtcctctccggccctcgcttccccgaccccgcacaggctaacgggagacgcgcaggcccaccccaccggctggagaccccggcacggcccgcatccgccaggattgaagcagctggcttggacgcgcgcagttttcctttggcgacattgcagcgtcggtgcggccacaatccgtccactggttgtgggaacggttggaggtcccccaagaaggagacacgcagagctctccagaaccgcctacatgcgcatggggcccaaacagcctcccaaggagcacccaggtccatgcacccgagcccaaaatcacagacccgctacgggcttttgcacatcagctccaaacacctgagtccacgtgcacaggctctcgcacaggggactcacgcacctgagttcgcgctcacagatccacgcacaccggtgcttgcacacgcaagggcctagaactgcaaagcagcggcctctctggaccgcctccctccggccctcctgagccctactgagccctgctgagtcctggaggccctgtgacccggtgtccttggaccgcaagcatcctggtttaccatccctaccctggctgacctgagagctggggatcttttaagctttgtatgcctggcctcaccttttcctctgcctccctcccagaccagcccggctctcagacacctctgctttctaggcaaaagttctggagcccagagcaagggccacaggtgcagtgcagtccaaacaggaccacgagcaattctctctccttcatcctcagatttggcagtagaagcttgtttttcagaacagggctggagtggcctctttgaaactctgaacatgtttcaactgtagaatagagccataatgggtgatcttggaagctccgtgggccaatcaggctctgccccaatacccgagccctctgggtgtcctggtccacctcagagcagaggtcctgggagcccctgctggcagggaggctgtgatgggtgagaacagccctcctccgtgtgtcctccgtgcactaagagaattcactggcctctgctgaagcggagtttagacagttctagaaaggagttgtccttggttgtggggcttccctagggtggaaactgtggtttggacatccttgtaccttcagggtacctgctagatataaggactcacaaaaaaatgaatgaacgaatgaacgagtggcacagtgcaagtcaggaggtttggagagtgtggggaacaaggtggaagtgtaaaagtcctgaatccttcattgatgggggatactgaggcctaaaggatggtgagcactttgattctatccaaggcagctggattcagaccaaagccctatactacagtgatccaggttacgagaccttcctgatcctctcttcttatgtaaatagagtaattaatagtagcacctgacaactgtgctgctgtgaggattaaatgaaacatcccaggagtcgccctctgcatggtgccagcagtgaatggatgccctgggcccaaggacctgcccagagtgcagctgctgctgggtgtggactcccacagctgaggctcccccaacccaagcagccaggaatctgtaggtcatagtggggcagtcaccatggagaccatgaagaggcagttgggtgtggggtggtatgctgccttggccaagctctgccagctgagtgaccttggacaagagacatgagctttcttagccttggcttccttatctgtaaagtaggggtgatgctagtaccatcttcacaggccatctggcctgagagggagaacctggcacaccacgcatatccaattaagcagaagaaggtgcctgactgcatgagtgtcatcccattgaatcttctgggaggtcctacaaggtatggtctctgttactctgggtgacatgatctgtcctgcagcatcacaaggggtctgtatgcctcggggcgccaaggaacaactcagcactgtccctgagctctgtacaggttccacttcccaaacccccccaacgcaaggcaaggcctctgttctcacctttgcatgccctggggtgcctggtactgagcatgatgcacggttagttctctgggaatatcctttgcattgcattgtggacgaggagggcccatgctctacatggaaaacagacctgggtcttttttttttttttttttttttttttttagatggagtctcactctgtcacccaggctggagtgtgcagtggcacgatctcagttcactgcaaccctgccctgggttcaagccatcttcatgcctcagcttcccaagtaactgggattacaggtgcacgccaccacgcccagctaatttttgtagttttagtagagacagggtttcaccatgttggccgggttggttttgaactcctgacctcaggtgacccattcaccttggcctcccaaagtgctgggattacgggcgtgaggcaccgcgcctggcccagacctgaatccttttaaaggagggagccaggatcagaaaggaactgattgaaggaaaagttgcctgtgaagcccaagccccagcctcacggtcccatccccccatccccccattgaggagagtcccccctctcagggccaggcctgctgttccctccatctgtgcccctcagatgcccagtgtaaggggtgagctggagagctaaggatctgcttgttctggaattgcagctgggagcctcgggaagaagagtggtggggcctcctgggagctgggcatggggctccccatcagttccagctctgacctctctgggctgttcaggcaaaggcagcagttgctaatgaagacactggaggacagcgtggcttagtcagcacaggaaggaaatgacttagtgcagccgggtgctggcaggcgaccacagcaggggcaggcagcccataagaccagcacagccaggaggccacactcccccgccccaccctgggcttgccttctttgcccctctcccttcaccaccctccacagccaatttgcttgtcatcacccacctttttgtgtttaacccgtcagctcttcctacctcattcactatttttttttgtttgttttaattaaggtcgaatgcatgtcacacaaagttaaccattttaaggtgaacagtttcaggggcattgacaatgtcgtgcagccaccacctctgtctcattccaaaacattttcatcgctgcaaagtaaaacctggacccactgagcagttcctcctcactcccccatccctacccctaccaatctactttctgtgtctatggattcactgattctagatacttcatataaacggagtcataaaatatgtggccttttgtgactggcttctttcacttagcataatgtttttgaggttcagccacgttgttgcatgtatccttacttcattccttcttccagtggaatcatattctgttgtgggtgtctgccacatttggtttatccattcatctgttggtgatttcgttcacttctaagtaactcctcaggtcctggtatacaacctgccacagtgaaaagaggcctgttccaggagtttaaaaatctacgtctctgaccaggttgagcatcctccagcgagttgcttgacctttctgggcctctatctactcatctacaaagtgaaaagcttggcaaaggacatttcaagttacgattctctgtgactttttacaaccctgaagtccaccctgccacttgtagaatgtatttcatgtcctccctgccacaggtgtgtgtcaagaaccccataacaaatgtcccagaacttgcacagtgcccccagcagatcaggatgcctgaacaaatctctgcctttgggtcttagggagccagaatctctgcgagatgcctggctgaagtaggtagtgtattgtgagtgattcccttattcaatatccagccagactttcatcagttgtgacttggaaaggaaatgaccaactaacttgtaacttgttcagatcctcattatgatatagttaagagacgcattttaagaagtgggcactaaactacatagtgaagatcccacataaatctggggctaggtgtagtggaaaaactgctatccttactcctgtagttcatcttctcagccttttatccagtacacgtttaatgtgccaggtggatgtggagaacactcagtgacagcagctgcatcaggtacatctgaacttgatggccaccacattaccccatcccctgctttaggcaggttagaaacatacagagaaactgctttaaaaacatgcttgtcctcaacatttaagagctttgaaatggaccctgattggagtggggtgatcaagttgtcttttccatttgaacttgaacttaaaggggaaaaaactttatgtagggaaggtaccaagctcacaatttaccgagcttccatagtccaaaaagaatttgaggggtttgtctgaaccatgttacagaattgaaaagtattttcatacaattgaaagtcagaaaatgggaggcacttgctatattgttctaacgtgttagctcgtgggcctcactcatatatttaatctttttttgttaagagaaagaagtcatacctcatgttttttttttttaacttttattccaaaaagaattttggaatatggaggctctgtaaactgagatcataatttcacctcctttttttttttttttgagacagtttcgctcttgtcacccaggctggagtgcaatgacacaatctcagctcactgcaacctctgcctcccaggttcaagtgattctcctacctcagcctcccaagtagctgggattacaggcgtgcaccaccacacctggctaatttttgtatttttagtagagatggagtttcaccatgttggccaggctggtcttgaactcctgacttgaggtgatccacccgcctcggcctcccaaagtgctgggagccatcacgcccagcccctccttcccttttaagactccaactttcctctggcattttcaattcccttgccctgctcaatttccctttccccgtatgctatttattactgattaattttgttgtttattgtctgtcttccacactagaatataagctccactgggcagaaatatttgtctatattgatcactgatgtacaatggtatccagcccataataagtgctccataaatatctgttaaactaatgaaatgaatgcatgcaggtgatttttgccactgaactgttttgtaactagaatgcaagtgacataaagcttcattaggattctcacatgagaaaatacaagcaaaaatctgatcctgtgaaaagtgtagcatcaaacttcattttccttccagaaaatgctttttaaaaacctgccaaatcttggaggctggccttttattggttctggggtgtggggcaaacaagggattttctgaaataatttatcagttactatcaacaaatttgctaaagcttgacatataacattcgccactgtgaacaaaagctgcctcccaaagtcccttgggtagtctttgcgcacactaaaaatccagagcttgaggcataagactgaccttaacattaaatgaattcatggttggacactttgttctaatcctttgtgaagcaaactccttggatttttaaaacatgctatcggatgaatctttccaatgaggagcatataaatatctcctttagtagttcctacaaagcatccatgtcaatgtcattaacagaatgggaatgatattggagggagtgggaggtggttgcaacttgcaattcagacagccagtgaaaaccttaacattaagtatccttaaaaaaaaaaaaaaaaccctcagtggttgtatttatcctgaatgcaaaactgtcccctttgttgagattggctgaactaactcagcctggagaacaatgttgaggctgctggcgggccatgtgctaatgtgctcatgcattacaggccgcaacagatggctgtgagaacacccggcctgccccgcctgggtcaggatgcagagcccaacgcctgtttccagtgctgtcccgctatgaaaacactgcttctctagggagaggcgatggctggcctgggggaggccagccatgtctgttctacccaattcaagggcaaaggtgcaagggaataatgatcaggggtttatttgagccatgttacagaattgaaaagtattttcatacaattgaaagtcagaaaatgggagacacttgctatattgttctatcatgttagctcacaggcctcattcatacatttaatctttttttgttaagagaaagaagccacacctcatgtttttatttttttaacttttattttagactcggatacaggtgcaggtttgtcatatgggtaaattgcatgtcatgggggtttgaggtacagattattttgtcaccctgataataagcatagtaccggataggtagttttttttatcctctctttcctcccaccctccaccctcaagtaggtcctggtatctgtttttcccttctttgtgttcatatttactcaatttttagctcccacttataagtgagaacatgtggtatttggctttctgttcctgtgttagtttgcttaggataatgacctccagctccatccatattcctgcaaaagatatgatctcattcttttttatggctgcataatattccatcgtgaatatgtaccacattttctctatccagtccattgttgatgggcatttaggttgattccatgtcttcgctactgtgaatagtgccgcaatgaacatatgcacacatgtgtctttatggtagggagatttagtcttctcctatgaccaggatgtggtgttttgagtatagttctaatttttctttccttccctctgacaagtttctcttcaatctttccctgcatcccagtgaatcagtgagaaagcaaaacaacccctcctgtccccccacaccaaaaccaaaccaaaacaaacaaaaaatccgccaggctttcttacaactacaaagtgaagctacagagaaattcctttggaaacatgtttgcaaagggatgtttgtccctgtatccctacaaatgagaagaaaaccaacattagccatcacgtttgctcttcccatcccaccctgaagcaaaggctcaggcaggtgtggctggtccagcagctcaaggcccaatgtcctgggagggaatgtgggggtcactggctctctttagttgtggactctacctacagagccaggccaacctgtccaagcagccctgcctgcttctccagctcatgaccccagagctgggcactggaactcactcactcggagccaggtcccctgagatgagagtggcacctcagagacatcaccccagagtcaccccagatacatgcagagacagagaagcacccaggcacacagagcagtatggactatcaacccctatgctcaactctctgaaacagataagcagatgtatggctggcttgtggtcttcaaagttggtctaagtttcctggtgttcatataggagcactgggaagctggcatgtggattactgatgtagaatggtgtccagtctatagtaagctggaagctccccacctgcctgtctgtcacactcagcatgccttctgttgatgccactgtgtggataagcatagtgtctccagggagccctgtcaaaacgcccattgcctgggaaggaatacacagcaagtcactggcactggttagtctataaacgcccattgcctgggaaggaatacacagcaagtcactggcactggttagtctgtaaagtactagtgataacatgaagtagggcactgacagcgtggaaaggtaaattttacctgtaagggaaggagggaaggcaggaaagagggagaacttgagatcaacagggctggtgccatgaggatcgcaagtaggctatggggaaggacatttcaaagccgtagtggtgaggatgcaggttaggtaccataacaaagaaagttccaagacagcagcttagataaagttacagtccagggaggtggcccagggttggtttgaaagcttcatggtatgaacaacccaattccctccctcttatttttctgctatcctcaacacagtctccatcttgctactccaagcctgccatcatgcccatattctgggaaggagtatggagcagggagagttctccttccttttaaggtacaaaccaagaatggcatacgtcacttctgcttgtattccctgggacagaacctagctacagggtcacatcaaactgcaacacaggtcagaaaatgtgggcttcatctgggtggccacatgctagctaaaacctttactaaaaagggagggcagacactggggacaagaagtagtctgtgtcacaccaggctgaggaagggaggtccccctcaaagagctctgcatccacagcttctgactcacagtccacccacaacacaaacccagactgaaacctgcattctcagggagagggaatgaatttctataggagctgtggggaaacgggaaattttaaataagaatagtccatttttctagcacttgctagtctgtagggccttttacattttacatgtgttacctcctttaaaatgagaagcaggtgcaatgtgcgcaacttccctttcacaggtgaggaggtggcggcgggggcttgcccaggctcccacagtggaaacgagcagagcctaggggtctctgaatgactcccagcccactgggcagcccagacaagctctcagtcccactgacgcaggcatccgtaggctaacatggaataagaccatcataacacgacgtgatgcccttgttcatgcccagcctttgggggctgccctcctaacctctgtgccttccctgaagggggtacaggcagtcatattttgtgtagcttcatgacacagaatcagctgctcattacgggatgcatctttttcattccacctccccccatggcctatcactgaagtgagccttattttgcaaggcacatcttcattcttggtgtgttaggaaggaaaaggaaaaaacgcctataatccaataaggcacacagaatcaagtggaatccaattcctccaagttcaagatgaaggaagctagatgcagaggctgaattatgacgacagacatgtcagttcatccccggagtctaagatctaagaccatggccaggatcaagctgcgtttgaaggggctcttaccaatcactatgaaattccagtgtgcctgaatcactatgacttggaacctttggatttctgccaaatcacaatttggactctatccacaaagccaggctgtggctctttccttctttcctgattcatgctctgccttcacccctttcattgctttttaaaggtttattttgaaaagtcttgttcagcctgagaactatctttcccatcagccattttcctctgcttcttaaacttccaggtcagggattctctggagtattaaagggggctcagctgatggtcctcagctccattgtgccctgttaggcaagtacctgtcctggtgcagtgacccagacatgcaagagaaaggctgtggacttgggcagcactgtctggtagaacattccatgatgatggaaatggtctgtatctacgctggctaatatggtggccacatatggccatcaagcactcaaaatgtggccagtatgactgtggaactgaactttcagttttatttaattttaattaactttaacttcaatagccacaggtggctgttgttcactatattggacagtgcagctctacaagcagaggccacaggatctctggacctcaccgggtgcatcatcaatcttggatttcccctgctaaaacccatacaatctggccaggctcaaaatgcagagggttttctcaaagtgagaagtatggcttttaccacaaaacattatttgtattgattccatttgcaagaaaaaccatcattctggaccagctgagatcatccgatttctgaagaatcacagagttagaactgttggccgattgcttgtagacatctgtgacgataagcttacgtcactacccttgcccctctctaacccactcccaacacccacaactcttatttctatccttcttcttcataaaactcattttccatttttccctctagcctaaatcatgagcactagcaccttatcagcagccaagaaaagcacatcatgtttcctttactgactttctcattaagttgcccccatttctccccctactgaaatagttgaagataggagtttcaaaggttttgttttaaaaggtatgcctactgtccagaaaaactttccccaggtctttgatgaccctctggaaagttatttaattttcccaagatctgttgtagataaagaaattctttgggtagggaggatagacttggcacaagctcaactgcaaaagtattattgggttaatacggtagttgttgactcttcttcagggattctcaataatggtcctgttacatttggggccagatacttctctgtggtgggggctgtcctgcgcagtgtaggatgttcagcagtatccctggcctctacttgccagttgccagtgataccctgtccccagttgggaaaactgaaaatgtcaccagacattgccaagcatcccctgggggacaaaatctcccccagttgaaaatccctgctctacttccatttaacatccacactgagctgagacaagagagcagaagaggaaaaagccacacaaagccatccatttctatttgaatccttaactgtcatgatcctctttcttgtttagaattcttattagtaatggacttttgccctaaactttgagaagtgagaggagaggaggacatggtgattttgcctacatacctctggaacatattttggaaccaagaaaggtagatctgaaaatgccaggagcttgattcatttggtttcctacatgggaactgtttaaaattaagagacaatgcactctgatatgactcgccaattgtacactgaattcaataaaatgttaataagaaaagttcacatggattgcactcttaccatatgctaagcattgttgcaggtgtactgattcaatgactatttttattcctactttacccatgaggaatcggaagcacagacatcatgcagttagtgagttgcagagatgggattcaacatcccaggcatataaggattgcgctgtatgggcagaccaaaaaagtatacatggcccctctaaattttctttttaaaaacattgatttttaaattaacttttcactgtggaataattctagattcacagaaaagttgcaatgatagtacagaaatttcctgtatatacctcacccagctttctctaacgttcacgtctttcataaccttggtacatttgtcacaactaagaaattaaaatggatggctaggtgcggtacctcaagcttgcaatcacagcactttgggaggccaagggggtgaatttcttgagtctaggactttaagaccagcctggcaatatggcaaaaccccatctattagccaggtgtggtggtgcacacctgtcatcctagctgttcgggaggctgaggtggggaggatcagttgaacccaggaggctgagcctgcagtgagctgtgatcacgccactgcacaccagcctgggcaacagaataagaccctgtaaaaagaaaaagaaagaaagagagagagagaaaggaaggacggaaggaaggaagaaagaaagaaagaaagaaagaaagaaagaaagaaagaaagaaagaaattaacatggttacaatgacattaactaaaccacagatttggttcagagttcaccagtttttccatgagtgtcctttgttccgcagaagaatacagggtatccaatacaggacagcacattgcatttagttggggtttatttttaatagtgttgactagacttgttcctcacaaccccttctagatcaaagcaattacagatgctgctcctatggaagatgttatacaaaaattccactgttgtgcaaaatggacacagagaaagctaatcaccactgtattaaggtttggtagaaggagatttatgggattaagggggaaatcaggtgagcatggcacactgggaggaagtattaaaattgctgagagtggaacagggctggaaccccctaagggatgtacaattaaaacacaacagataacgattcccctgaaaagggatggaacgagaaagacaagtgtcacagagaactgcttagggaagcaaagggtccattttacaaagtggcaagagaaaagagaatctgcctagtaagtcctcttagtaggagactaactgcaggtatgacttaggctgctgagtggttaagactttacaagggaaaaatgagagagagagaagagacaggagtgtatgccagacacgtatgtgcatatagaagagacatgtctgtttcagacctgcccacaacctgaacaagcctcatttctgtaattacaaagagctcacttgattctaaatctgcagtgtaagcattcagaatccacctcatcagtgtcaacaggcaagaaacctgtacttaaaggcactgccaatgtgccttggggaatcgcttagaaatccagtgccattgttagaaaacaagggttaggccccagattgggacacatgtaagataacatacaacacagttctctctccaaaacttctcatgcattctcctgcccacaccatgtccaagaggtaactgggatttgctacgattttttttttacaaggactataaaacaatgccagagaagaggggcaggatcaggagactggaaaacaaggaaaggtgatatggtaggaagcaggctctctccatctggcatgtgacatcatccccctacccctcgcctccttccctgccccccaactctatctccaccgttctccatatgcacgttcctcttttaaagtgttaattttggccgggtgtggtggctcaagcctgtaatctctgcactttgggaggctgaggcgggcggatcacgaggtcaggagatcaagaccatcctggctaacacggtgaaaccccgtctctactaaaaatacaaaaaaattagccgggcgtggtggcgggcacctgtagttccagctactcaagaggctgaggcaggagaatggcgtgaacccgggaggcggagcttgcagtgagccgagatcgcgccactgcactccagcctgggggacagagcaagactccgtctcaaaataaataaataaataaataaagtgttaatttcttcttttatttttgtgacaagagagtataatataaacagcaggtaagaaaagcatgactcttaccaggagagtggatggcatccaatcttcttcaaatcgaggcacgaagtttttagaagtacatagaatttgagcaatctaacatgtcatggaacaaacccaaaccataaccttcatgctaatgaaatcacaagaaataaatgcatgggagatttgcatgaaggtgactgaaattaataaactatatcgtgctccattggaaaggatcgaagagcagatgctaacttagctgacctgacaataagtggagtagtgattagccatgctgcagtgactcactgacctggcaagcaccatctgagagcagtccaatttaagtcagtcaccatagcgtcagggcgggagggagacagggatctcccaatgaggttcgtgcccttctctctggaaagaccagctaaagagtcaacagggtagctgataacaccaaataatgttgttctacacataggagacaacagatgtgtcctggatgatttagaagaggggaagagaaagaacacacgaggggcccagaagccagggaaggcttcaggaaggagggagatttcaactggtcctgatagatgaatcagattgaagcagggaattgagggatgctaacagttagaccacccttgggttgattctgctcagagagttctagaatcctgatgatggaaagagcaaagtcaactcatggtatggggtgagacctgtgctccatcgtcatagcccacaaaccctggcacatccatggcagggcctgaccccaaacctagagtcagcatcttcaagggttagtgccacgaatttgtatgttcgtaattaccaggtgattctgatctaatgacccctatctcaaagatgaagaaatcgaggtccagggaaaggatgtgattggctcatggggcatatattgtgaattcatttaggatgtgactttccaaccatttctccaatacttctccatgaagggtgtgctctgaaaccccacctgcagaggcaagcagggtcaccctacacctctctttggctggactctgtctcctcgactgggttcggaaggttgtaatggtgcatggcagcttctctgctccattgttaataatccactcatctggaagaaaaagcagcagcttcttccaccaccccggaattgcaacatttgtccttagtgaagcaggggatggaaaaaaaaagaaaactctgctgatacagttttgccttttcctgcaggtcctttggactcagcctgagaacctgccccagctgcagaagcgctgtctctaaagggctgccgtcttaaccccttaacccaaatttcattccctcaaggcttgccaggggccggtctgtcgtcacaggcattccttgcagacgcatcaaggttattttcccatttttgaaaggatgtgtgggaacatggaaattctgctctgtttcagccaaaacagaaaaacaggattgtgttcctaaatccttgaattcctctccctgctcctctcatcatttcctgaaatcccacttgtatgtcctcctgcaagactttgcagtgcctctgttatctgactgcacccaagcaggcatcattaagaccaactcccagttgctttttaacaagctgccccacccaccatctcggtcccccccagagcatccccatcttttctgtttccaaagatatttttataccttttgtttcaaagatgattcctcccaggacagggctctctgaccacctggtcctgtgcacaccctctgtcccctgcactgatgccctttgccctgacatcccttcagctttgctaggacaagggtctctggcaaggggctgaggccactggcttaagtggggtttagagatcacacatttatttcatgtatccttgcttccctctaacactgaaaacctgtcagttactcattcattcatcaaatatgaagcacctattggataccaagcactgtatgaagccctgagatggctgggaggttgctatggctccttatgtattcagatccaacacgacagactgaggaaacgatttaggaatcaaaatcagagctgcctcaagaagtggatcgaagaatccaagtgactgcaaagtctttttcttccttttgtaaataaacagttatgaagagacaagaaaaaacatctcacaactctgtctggttccagggaattgggctggtcatatgtgaggctttaggcacagagcttcatttcattctattcacgtaatgcacaagtattaagtgcctcccatgttgaagggtccttcctttccataggatatctgcaatccaaggcctatggggtcatggtgatgggtctgaaaaacccaacaggtatgaaaatgttctagagacatgctgtacaatgacatgaatatagttgacactcctgaacagtcgctgtaattaaaaatggttgtgatcagccaggcgcggtggctcacgcctgtaatcccagcactttgggaggccgaggcaggcagatcacaaggtcaggagctcgagaccatcctgactaacacggtgaaactctgtctgtactaaaagtacaaaaaattagctgggtgtggtggcgggcgcctgtaatcccagctacttgggaggctgaggcaggagaattgcttgaacccaagaggcggaggttgcagtgagcagagattgcaccactgcactccagcctgggcgacagagtgagactccgcctcaaaaaaaaaaaaaaaaaaaaaaggttatgatcatagatttcaggtatttgtgttttaccacaatttttcaaaaacctgacaagtctttccaacagccctcccctaaagaaaacaagctcattttctcatgcacactggcttatgggcagtgccaggaaagacccatttcccagtagcaggcccagcacgaaagagccgacggggtgaggggtgggccaggggtcccacgcagaggggccaggacatttgaggctgcctcatctgtgcatacgtcctagggatggagccaataagagacagatgtgccctagaccctacctgctccgtaggcaaaagccaatcacagccagggatcccaacatttgcgtgaatgctaattgaggctttttatttcttaacttgtgaagatggcagaagttttattttcttctcagaattccgcctggcctaccagatgcctagctcttaaaaggacctcgttctctgcactgatggactctggcagagtttgggatgggaggtggtggtgaagaggaggcagtcctacactttaagtgagaaaagtacaaaaaaaaacggtctctaaaacacagctgccaatgtcagtggggttccttcattcttgaaattcacctgatgacgatgaacaggttcaatatgaagttcatttttcaattcattctatctcatctgagtacctactctgggaccatggactgtatagaaattaggacttgaaattgtcctttgccacctccttccttctccttatggagtacagaacaatggctctgggcagggccagcttcaggtgtgcatgacccattgggacagtggcgtagaaccccgtgcttggaagagccttgaacgtggtcaatgctctgctgtcagcccttcctgacttttaaataagggggccccatatttacatttcatactaaggctcaaaaatcatgtagctggttttgctcttggtaatgaaagactccttgaggtggttcccacagttttccatatcccagccagggctctcttcacactgtccccacttccatggctggagccgtagttttttcctggtcataactgtggaaggcagaaaaaactcacttcttaagtcctaacccaagatcatattttttcctgttaaaaattgctgttcatcttaaagtagcaacatgagtcttaaacgggattcagtacttcagtccaatgtgctaaaatgattcagttttaaagaaaactatttttgttggtgcaaaagtaattgtggtttttgccattaaaccacaattacttttgttttgttttgttgtgttttgttttgttttgttttgagacagagtctcactctgtcgcctgggctggagtgcagtggcgcgatcttggctcactgcaacctctgcctcccgggctcaaatgattctcctgcctcagcctcccaagtagctgggattacaggtgcccatcaccacgcttggctagtttttgtacttttagtagagacggggtttcaccatgttggccaggctggtctcaaactcctgacctcaagtgatccgcccgcctcagcctcccaaagtgctgggattacaggcatgagccaccatgcccagcctaaaccgcaattacttttgcaccaacctaaataaatttccctatgagtcctacctaggcctaaggaaggaaagggaagtccaacacaagaaaaacatcttcactccttaaaactcttaaacatgtaggctccccacgtcgtatacattaacatctctgctaatgtatgaaataaatttctggcacaaaaatcctaactcattcattaagaacaacaggaaagcaagttctaccaaacaccataatcaacccactgatatttaccgatagccttccctcacccccacccccaaccccactcccactgtgggacttaaaaggacaaaatatttttgtgaaaacagcatttgtgtgcttttttttttaagggctaagaatgtgagatctaaatcaattctaatatatttcaaatatattcattatcatgcactaaaagagaattcccattttgtggttctccaaggagagtgacagagccttgtttgtaacagccccgggcataagcaatcattgtgtagcttaattagatattccccgtgctagtgtgagggacatatgtccattcactctgacaaacactgacagcggccggcgctttcatgatcctgctctatgcagataaaggcaacgcaagtgcgagctctcccaaggacctgtggccccagccggccccggcacaatcagcccgcattcaccgattggttccagtttattaatagcctatgaacttctcatctgctcccggactggttaggactgtcacctgcaactgccaggccagaaaaggcttttccactcctcgggatccgagcggatctgggtctgctgggccaggcgcactttgtattttccaacacaaagaacaatggatttgaggagttgtaaattgcaagagtggaaaagcagatcacgttttaggtgggtccagaagggaaggccaccccacagtcaaagggaaggcaactagaagctaaaataggcttggctaattttaaaagctacttaaattcttatagttccaatttttaaatataccttcaaatgaataggagtggaggggagcgtccaaatggggaaaagtcttggcccatgtcctcaccttctctttggaaaaggcaaactatgaaaacaggggatgaataccagaatgtccctgggtccccaatattctcttgcacaccccaccttagaagtctgtctccaccctcttctcagaaccgagtccaacttttttcggctgaaaacccgttttgatcaggaattctccctgacttttttctcctctggggaaatgtgtattcgttagctcatgctgccataacaaagtatagcaaactgggtcgtttaagcaacagccatttattggctcacagttctggaagccagaagtataaaatccagctgtcaattgtgttggttccttccgtgagggaaggatctgttccaggcccctctccttggcttctagagggctgtcttctccatgggtcttcatgttatctcccttccatacgtatctgtctctgtgtccaaatttcccctttgccgaaagacatgagtcacaatggattagggcccacactaaagaaatcattttaacttgattacctctttaattgattacctctacttccaaatacagtcactttctgaggtactgggtggtagaattccaacatatcttattcccaaggtatgttgggaaaggaatctttcttccatttcttaagggacctaatacaaaagcaccacttgctctaactccccacccagactggagatatattaggtcccctggccaaatatcaaccccatcctctaagatcattgcaaaataaaccactttcaaatacagagaggccctctctgtctttgtcttctactgttacataggggctactctggtggaatttgagtctttaaaaatggtccaattctatttcaaagaaagccagaacttgaaaagacctaagagaagagttgaacccctctgtgcaatgggcccaaaggggaaatggcctgaggtcaccacgctagttggtgatagaacggggtctagaatccaggcagcattcagctcctctgatgggtccacagagcagtaggaagtcttgatgccagctagtgagggaacccctcagtttaactcctctgagactggagagctcccaggcacccttgactggcttttctctcctctttatagggaatccaagaatcccccatctggaccactatagaaaggcacactgtcaacctgcatcagcgcaatgcttccactaactggacagatctagaattaaggcaccaaagaaagaggtccacctggtcagttgataattgatactctttataattgcaagttaatgggctcttgaagtctggcagatctgggtttgaacaccagcaccaccatctaccagcagtgtgactggcatccaccatttaacctcagcttttttgtaaaattcctacctctcccagttgtcatgagaatggacatcaataatgcatatacatttcttgatagcaataacataactgaccttaaaataggtcatttttattagttatcctccttaggcagaaatgcattggtcacatggtggacccagaaatgggaagttgttttacacaaattaaaacaaagcaaagctttattttcctcttatccaaagctatttcagagaataaataatcaggaagcagctgtcaagtgaggtagatgaatggttagttttcccagatatcacttcattccactcctacagaccataagctggcagaactgatcaacaggaacaatttaagaatgctgcctaggggcactccaatgagctttttatccccatcagttgtggatagccactgtggtaggacagaggaaaatagatggaatgtcaatataagtatcaactggaaaggttctcccaaattaaataattagcctggaagacaaaccccaatgtctgatgaggactcagtggtccatttgtgaggtgaacatgaatcccttctaaggaggcagctccctttgaatgcttctaccaaagttttccataatctttggtgtctatgaggtcagcaggtcaggttattatcactctaatattgttccatgggtcatgtggtcaagagattcccagagtcacatggcagagccaagaccaggatcagggcttctgccactggactaggctcatccctttcactgttccagactgttctagattattccagactgttccacactgttccacattctcatgtgtgccttggggcccaaaatagggatgcttgaaaaactgccacatattgttttcaggcatattccaaatgtctaagagatttatagagccattttgtctttactattaatgaaggtgacaactggccaccatcaatctcactaatgtgaatgcaaaataactctacaaatctcttagacacaagaatggaagctgggcatgcccccgcgtgaggttatttcagagtcacctgaaggtcttccatctcccacctccccagttacaatgttttgaactttttatttccttggatgtctcaaatatccatagagcttaaatgcaaatgtctgtaaaaaataaaaaaatacaaggggcttcctcagcagtttacctccatgtgatatgcctatgtccaatacagaaacacctagtcagacgcacttcccatgcccaaaggggcagacagctcttcttgttgtatgtggttggcagggggagtcagacccatggaaacatttttacagttaggaaatgcaggcaagagttatgcacacacaagggctgggggctgtttcaattctatattgtagcagagcaaactatctccaaacttagtgacttacaaccaccagttcatgatttctcaagaccctgagggtgggaagtctggagagggtatcatggggatggctcccctctgctccatgagcggggctgggatgtccatgacggcttcttccctcccgtgtctggtgcctcagctaggatcagtcagggtcaccactaaataattggcacggatggcttaaatggagggggttggctggatctgctcggtggggggctcacaaggccttgggttaaggtctgaggtcttgggtccctttcctctctttccatgtagactcaggacatctctccctctctccatgtggcccctctggctgagcttctaaaatggcagctggcttccaaaaacacaaaagtgaaggctgccagacttccttaaggtttaggcccagaacaggtataacttcacttctattgcatcctgttgactaaagtgtgtcacgcggccagcccagatttaatttggaagggaattacacatagacttgggtactggaggtgtgttgcagtgggggctatctttggaagccagctaccttaggagctcaccctttccaccttctgcccctgcaagggctgaacagatcagtctccatctttgagtggtgctcccctcaggacagcacaggagaggctgggtctgccattccccccggggacttaattctcagccacatgagagtactggcaatggatgaacatggatggcaccatctagccaaggatggaaaattctccctgcgcaaatgtgaacaaaagcagtttgcagtatgtaagcaattgctcaaggctgataacagcctcagggggaagtccaacatgagaaagcagagggtgcctggtctccacggactcttagtgggcatttgtgcacatctagcagaggagaacggaggatctgacagcctttgtgcagcaggctggagttgagctccctcgggatttgcatctggtgataaatggaggctggctgcacatgaacactgtctgtctgaggctgtgcagtaaccccaaaaggacagtggtggacaggattcccctcaaatgggaaaagataaacaggaagtgtggggtggggtattggagtctgttatgtccgctgtggacgttttgtttccccaaggtcaagatgcctctataaaagatgtgtggttggccaagcatggaggctcatgcctataatcctagcactttgggaggccgaggccggggccggaggattgcttgaggccaggagtttgagactagcctgggcaacatagtgagaccctcatctctatggaaaataaaaaataaagatgtgtggcagagattttctctttatgcagccaaacaaaatccatggctggattttcattcattcaacaagtacttatcctggactttatatgtcccaggcagagtcctaggccctggggacaaaaatatttacaatataattttaggctggaaaaaaagcaaagcttatagggaaaaggatggttactacatggatattggggcagggaaggcagctcagataagatgactttggaggagaaacctggagaagtgtgtataccctgaggctccacaggacaggtgctccaaggacagaaaactgcaagagcaatggtacagaggcaggaacgaggctggggtattgcagaaaggtccatggggcctgtgcagttggagcaaggtaactgcagggctggggctgggagcggggatggagaaggggcaggacagggagtctgagaggcagacagaccctccccccactccacccctgtgcagtctcagggcctctctctctctctctctctcagtgtagccccaagcaagaccgtccaacttctaatatggccactgcttccaaaaacccaaaagctcaggggtcaggttgggtagaatcttttgggcccttggatttaatcctcagtatgttagaaagctacaaaggctttcaagagagaacagacaacctgcctggtttacattttgtttggagttgaagccagggtggtctcctcctatgcatattagcggaagcttggacactggtcatttatccagaagaaagtaaaaactgaagggtcaaatgaggctactccgaatattgtgagacctaggagaaagaagagaaataaggccccatggcctgtatcccgtccctctcctctccgcatccccagctccgtcttgtgctgcgggcctcgtgcacgtgcacaggatgggggcaagctctgggtggactggtccccatggccctgagtactcctcacccatggaaaggggcacagccagtcggggcccgagtggagcctctgcagtccaggcccagggcaggtggctgagtcggagcatccaggggcagctctaattccaaccatgaccacagagaacaggaggcaccaggcatccactgtcagtctgtaatcaggatgatcagtgcattccccactcagcacacagtctcccacagacatgcagccacggtgtggcctcagcatcagggatatttgcaacatccatatggcttccagaacaagagagcagggagggtaagaacagggagcagtgtgggaaatgggtgggctcagaggcctgcccaggagttcttggccagggtggagaacccatctgcagtacagtgctgggggaggccagggaaggaggctgggtgtgaacatccaaagagcctgcagagtgggcacaatatgggctgtcgccagctcacgatgcctccctttctctgggctgcagtcggcatctacgattaataagacatagagaagtcattcaccagaagtcctcttagaaaaagcagtgcttttgactggaaaagaatgatgagttgcaaaagtatggtaagttaaaaatgcatcttcggaagagggtgagttctgttagcgggtgggcagggggatggagctgggggctggggccaggattgtgctgaattaatatgtgtaataatgcagggaggagccagagagattggaaaggtaaaagggtggaaagagagcaaaacttaacatgggtagtggatgctggagaaagacgtgaatggggagttggagttgtctgttgagtgtattgtttacagtgcaaacctccagaggcccatgaagggatcctgaacctacactactgcagatgggctgagaggcggcataaaggcggggctggggagtgacagaaaaaagttgtatcccgagagcatcccagcgagcctctccagcagcagcaatccccctgtgccccattgggttccaccagctcagagcaggcagggcctgaaacagatgaaaccaagaagcagccagtgatgggtgacccagccagctggaacccagcccagggcaggaggcaccaggaatctcctgtccttggcagagacgcggttttgatccaggctaatactgacttctgatactctcagcagcgcagaattttagacctgaagagtgacagccacctcagttcttccctttgataaagggcacatgaattctgctctgttggcaagagtccaacaatgcaggcgagtccctgatctggtaaagcaaagaaaacttgccctaaacactctacagaacttaaaagcatccaccactcaaattgggaagaatcacaggagttaataatggtgttattgctcttcttaaatgttattaatagtgatataatacttcctgtctcctcatttggagacaagcagctgccatgcgccaggataatgaaggtcataataggggaggaaggagcatgaaattgactctgaccttagtctccatgcaatgtgggaagcagtgccagttgccacagctgcaccgctttccctcccatcagcggggagttgacggaaggccaagcccaccctggggagattctagaatattctagcaccatgaggctggaccgcatcccaacctggcaagaaaattctggtgatcaagagatcatcattctgcaaacttcctgggaaggcttttctgatcaaagaactgcgggtgtccaatcctgcacacatgttaacatgtacgagcactgaggcaagaggcacagtatgagagactcagagaacaattctttcctgtctgtttagccagggctctgcatcaagtgttactgggctggcctcagcttcctcatctgcaaaacgaacagttgtctgcccagccccataggagttctgtaaggctaaaatgagataacagatgtgaaggtggtttacaaaaaataagtgtggggctattcctctgcagggaacatctctatcacagctggttagaggtgaccacagacctctgctgcagagcatgcacccacaaacctggacttcaaagcagcctcttttgctgagctagctctgcccctgcccaactcctgttgggcaatctcaggttgcaacatttctgaaaacacattctgactgattgacagaccagaggaaggcaatgcaccagtgtctcaatccttctagaaactgctattaaaaacagaagactgcagggagggtgcagatcacagtggctgtggctggggaattttccctattttaccccttcctttcccccatcctcctcacttgtccttccatcctgttcccgttctctattccatacataatggtctcattactccgcctctctgcctgtccctttcttgaccccccaacccacccattccttgtgcttatcaaaccccctctaagacacttcagctgccagcaaactctccgtcacccaaccctcaaaagtaaagccttgctgtcctccaaactgtggtcctcagaccaaagcatcagtaccacctgggcaccttatcaaaatgaagaaccttgggctccaccccgacccactgaaccagactccagactttgcattttaataagatctactagtgcatatgtgtgctcaggtctacagcagctccgatgacctcccctagctctaacacacaggcttcacccctcgtccataccactgttggcctttcttggtaacctgatattgctaggcagacgttcacgtaggcatccttcatatccccaaacagattacaaatgattagaaggcagggaatccacactttctccaagggcctagaacagggctctgcaccatagtagatgactgaccaaagacccctgaatgggtcagaggactttgatcagtcagtctagattcatcctcttcactcattcatccaagtctttattaagcagctactcagggaccagccctgtccaagcactggggatccagctgagagcagggctttcatggaagcctctagagcaggaggaacagtcacatacaaacaagtaggcaagtaggtgccgaggtggctttagctgctgctgagtgccaagaggaaaatcaagcagggaggagtggccacagagtaactgactggagggtggccattgggttgggtggtctgagaaggtctctgggggctcacattttcactaagacctcaacattgagaagacctggatggaggcttcaggcagaaggaacagttggagccaaggtcagacagaagaatgggcttggcctatgttccaggcacatggcttcttcaccctgccccattccaggtaatcacgcacccaccatgtgtcatccatccaccccctctcccaggggcaggaccaatccgaggtctcaggcttctccgaatctgtccctgtcgccaatgagcagccctcccgagaggtaggatgtctgcccgtggttgtttcctcattgttttctccaaagccgactttgctttttctttaagcatggttgggcactccatcaaatattcatgtgcctaagtgacatggatatggaaggaaggtttcttgtaaaattcaaattcagtctcatgatccctgacggaacctgccgaggtcgtcttgaccctcgctactcactacttaaagtgtggtcctctgaccggcatcagcttcatctgggagcttattgaaaataccccaggtgtcctgttgtgcacctatggtcccagctattcaggaggctgaggcaggaggatcacctgggcctaggagtttgaggctgcagtgagctatgaacacatctatgaatagtcacagcactcccacctgggcaacacagcaagaccccatctctaacagagaaaaaagaaaaacagaatctcagcccccactcaaacccactgaatgagaatctgcacttgaacaagacccccaggtaatctgacctagaacagagttctgccttcagactcaaggtccccagaaatcaccaaaacaagctacacagaacagtgaacatgatggttagccagatatgcatcggatccttgctttaaaaatctcttgtgagttgggtgtcattatgagcttcgtttacaggtgaattaactcaggcacacggaggttgagtcactcgcctgagttgataaacttggaagtggcagggctaagtttgagccctggagggctcaccgcagacctgtgctctaacacataggaggagtgaggctcagaggctgtatctatttgccagggctgacatcaacaaagtaccacagactgggtggcttaaacaacagagatgtcctgtctcccacttctggaggccaggagtccaagatcaaggcgtcggcagggcgggttcctcggaggctgtgagggacgatctgctccaggccctcctcagcgtctgggggttgctggcaatctttgagcttccttgtcttgcagggtcaccctgatctcagtgtcacctcaatctctgccttcatcttcacatggacttctccctgtgtgagtgtctgtgttcaaattctcccttttataagcacaccagtcatgttgcattagaaacatggatgaagctggaaaccatcattctcaggaaactatcgcaaggacaaaaaaccaaacaccacatgttctcactcataggtgggaattgaacaatgagaacacttggacagaggagagggaacatcacacaccggggcctgttgtggggtggggggaggggggagggatagcattaggagaaatacctaatgtaaatgacgagttaatgggtgcagcacaccaacatggcacatgtatacatatgtaacaaacctgcacgttgtgcacacgtaccctagaacttaaagtataataataatttaaaaaaaaattatatatatatataaaagaaacctaccctagtgagctcatcttaactaatcacctccgcaatgaccctatctccaagtaaggtcacagtctgagggactgggggttaagacttcaacatgaattttggggacacaatcaactcataacaaggcttggtaaaatgataatgacagctaacgctgttctcactttgttctcagtgctttacagatatcacctcactcaatcaccaccctcctaggagattaattcgatttttattcttgttttgcagatagaggaaactgaggtactgacaggtaagcatctttcccaagtcacatggttaataaatgaggcagccaggattccaacccgcgtagcccaacatcaaagctggcatgacagctttctctctccaagggtgtctagcatcacactgagctcccatctctgcaacttttcttttcttttctttccttccttccttccttccttcctttctttctctctctttcttactttttttttttttgaaggagtttcactcttgttgcccaagctggagtgcaatggtgtgatctcggctcactgcaacctccacctcccaggttcaagcgattctcttgcctcagcctcctgagtagctaggattacaggcacccgccaccacgcccagctaattttgtatttttagtagagacagggtttcaccatgttggccaggctggtcttgaactcctgacctcaggtgatccgcctgccttggcctcccaaagtgctgggattacaggcgtgagccactgcgcccagctacaatttctttagcaagttgttgctggattttggcttagtgtgtccaggacagcatccctgaaacagggtcatatgagtggaacatcctgggtattcagcgagcccagggacagaaggggctggaaaccgcatatgctggatgcagagaaggcacacacttacacaaatagagctgggacactgtgttagtctgaatggaaaccataaatgaagtaagtgacagggctcagttggagccccaagggtctaaccacagactctgcactctaatatgtgggaggagtcaggctcagaggttgtattagctgtagtgcctggcatattgcaagcactcgataaacattagctactgttaatcattttactgagatactgctatgtgccaggctctgggtgggacatctcacttacatttctttcttttcctttctctctctctctttttcagacagggtcttgctctcttgcccaggctggagtgtaatggtgtgatcatgactcactgcatcctccgcttcccgggctccagcaatcctcccaccccagcctcccaagcagttgcacaccaccacacctggctgatttttgtatttttcctagagatgggttttcgccatttgcccaggctgatctcgaacccctgacctcaagcaatccacccaccttggcctcccaaagtgctaggattacaggggtgagccactgctcctggccctctcttacatttccttctcaactgtacaacaaccctaggagataaatactattactcccattttagagatgaggaaactgaggctcagatgagtatagctgctgttatccccaatctggggatcaggactcttctttgtaagacataaacagtccatgtctttgagcagaaaagccttagaatattgcagggaagaagatttgcatgttcaactcggatagtcctcaccactgagttaatatttccaggtcagagcgcctccgagagaaaaaggcggtggccttggagctctggtctccttaactgcaccctgggaagtcttcacacggcctttcttcccctggtggtctaatctggagtcagatccagccgtcagctcttacagacggggaaggaccgggagccaacgggaaaacaacaggtgagcttgtgaacaagtccccttctgtgtctcgggcagggtgtctgcccgggcaactgtggggctgcactgacttccagaaccttctgcctctgcaggtgttttaggaacttggcctcagcgcttcagtgacccatattttattacctttcaggtttctataattcatcattcactcctttctgaaaacctagaatgaaaaagtttagcagctcagcgccgcggcctctctccattctctccccaaacacatcggcctgtttgttctctttcatccccgctcttcctgttgcattctgccggttcaatggggaaggagtgaaaccggatggctggacccagtgcggggaaatgacttcagagccacctttgtttccctcattcctttgagcgcacttggccctgcgtctctatgaaagggcttgtttgaaccattcggaacatccagcaagccagagatgctgcggccagaaccgctcgcatcttttcaggctgcctgagactctgggttaaactgccaaatttttgcaacaaaactaaccatgacattggacattgtgttataaattagccacagccttccaagcaaattgtctctttttattgtatcagtgtaagcctcggaaacatttggcttcagctactaccttcagggaggctcagaggatatttttgttctgccccaaaccaactcttcagacaccgagttgcatgtgctaatacccatatcttcattcacagttattcttatcacactccctctgagaacctctgtcagttatgttctatttctctgcctcccatccaccaacctgctttcaagttttgatgtggcagaaactctctgaacatctataaaacaaacgatgcatttctcttttagaatgcatttcacaatgattacgtgaaacttcttgtaaagaatagttcttttcacatatacagtcagagatattaaaatgcatgtttattagcaatgtgtagaattttattgtttggtgctcacagaagcaatgtaaatttccacatctgttaggtcactctgagagtgtatgtgttgtgtggggagagagggcatgcccatctgtttgagctatgtcaccaaaatctatatcaagatttttaattaggctgagagtggtggttcacgcctgtaatcgcagcactttggaggccaaggtgggcagatcacttcaggtcaggagttcgagaccagcctggccaacatggtgaaaccctgtctctactaaaaatacaaaaaattagctgggtgtggtggcacatacctgtaatcccagctactcggaaggctgaggcacaagaatcatttgaacctggggggcggaggttgcagtgagtgagatcacaccactgcactccagcctgggtttcagagtgagattctgtttcaggaaaaaaaaaaaagagaaaaaaacacttttaattaaaaggaaacccccaaaatacacagttgataatttattttcctatttttttcttcacacacacacacacacacacacacacacacacgcatcacaagacaaatttaggctcagaaataaccttaagtaataagctgtattaagccacaatgccatttattaaaaataaaataaaccttcttataatatttgcaaaacacaacccatgacattcgataatcttgagtgttgtcatcagaaccaagaacactgtataactgcctatgtccttccacattggaaataaagacaactatgacaactatattgcattgtacacaacaactacacaacattgtaagcaacaataaacattgtgtcagtttacaacaacttgtttaacttgtattctctgtcaaagtgaacaaaactcattttctttcacattttcccagcaggaatctttatttaacctgaactgcttctaagtgtgactgagactctggtgagctggtcccagatgagatgggatcaagcatccccaaggagtcctccctgtccaagaacaactaccgaagggtaatccatttactcttccccaattttctctctctactactactctcctctacccagaaaggagaaatgtagaacaaagctaagggctactcgctttgcagctccttccctgacctttgtgttccaggaagagttatatttggatgggatgggggcacctgatatagggcaaacaacggacaaggcttccgcttctcctagagacagtgtaaatatcaacacctactgggtaatttaaactttccaaagaatattgaccttcttagaagtaagtagcactttaaaaagtgaacttcattattccattagaggtctaagctctagccagttaagcagcacattttagcagctgtttacactctgctggccttctgcaagaggacggtttcatgcaggacaacagggggcttcacagcagtacaccccatctttgttcttacagaggagaaggatggtgctacatctgaaacacactcacacatcactgaggctttgagtccccagtgtctgccatttccaaggtccaagcttcttgacccaaagcaagagtagatggcagggacaggggaatgcgcaggagacactaggtttctacacaaggaaaaggaaatctgaggcacacacctctgcagagtgaaaggaatcaccaacacacacacacaagcccctttaggcaaagaaaagagcggttgttatggtggacacaagttgctccccaagcatgtcctcaatgtgggaggccgcagcagctgcctccccttgagacagaccccggggcccgtgccagcggccacagtaactggctggcccttgccagctgtcacactttgcatgccgctgcttcagcccagcacaagggaccatccaagtcaccagctccaaccagtcccaaatcccgtgcccaggctggagctggatggccacccagaaccctcttctgaggccctctaccaaggcactgaaatatgcagcatatccagttgacagtatccttggctgggggagagataagtcttacaaggaggagataaggtgagacttaggtctaaagaaaaccctcagggacacccacaggaaagaggggtgcttctagaggggaaaggcagcatgtgtgtgtttccatctgtttgactcctgggtgccccttcctgtgggtgggaaatggggagcgtacaagttaggcaacaggccaaggctttagattttatcttccccattcacttcctctttctgctggcagggtaagaccctacgggccccacctaggctgtgtgcaggggaggaagccggagggggatgtcaccagggcctgccccaatctggcacctcagctacaggacagagggtcctgacagtgagggtgggcattgccgaagaggctggagcagggtttatggtggcaggattctggggacactctcttggggaacatggctggaacccaccaactcatcaatattggcacagtctaggctggcccctccatccttacacccaatccccaacccgccccatcatggccccctcctgggcttcctggaagcctggttctgctggagggaattcaggaagccagtccttggtggggccgctctgcctgtcctgtctgaaggcacagagcaatctactgccttctgggagcctcagttatatcatggacatcaagggatcaaaaatgcccagctcacaggggccccatgagaaccaaacgtgaaagtgtctgtaaaaatgacttgaaagcaagctgcttcaacagaaggcgaaatgattagtgaggtgttaaacttaattgcttgaaacattcaagacccttcccttggtctctctctctccttcctgcttagtatggttctgcttaagcactcagctccttcctaccaaggcttccctctctctcccaaagtggggcccccagcaccacgtccatgtcaggccaggcccctctgagaggcaggagatcttaccaggttccttccctctctataaaacctttaggaaaatgcttgggttagagcattgccaggagtttgtgcatttaagggatgagcctctgagctaagggagatttcagaccatctttagagacctccaggacacacagtaagtgccaagcactgtgctaggcttcaggaagatggagaaatgagcaggtggtccctaccgtaaaacaatcatagccaaatgcagagatggtatctacataacacaataggctatgaagaaatcctatcaatggtttgccaagagtcatgaaaggaggaagaggagaaatcaccaaggcttccagaagaaagcaaggttggagctgaacctgaggcataggcaggatgctacaggcagagctgggggtcagaagcaaagatcagagtgaacccatgtggcaaatattggtggaagaaaaccagaacaaagcagccctgaaaccagcaagcacagccaccaagatgccctcttccccaggacattgacaagttatagtagcatgcactggtgctgggggcagaaaatgtccatagacaccaagtaatgctattctatttggcaaataaaatgattcattcccaccctcaaccgataggactatgtgggtgttttgttttgtttctaataagaggccaatttctgagtgacttttgcttaagcaaatgtcaagttgctgatagaccatccctttcggggaggatagaaacccgacccaaaggctcctttgtccctaaagacctttcaatcagagggatggggaaggaggttgggagcagcagggaggaaatatcctaatgctacttgtcatttagtccagaaatttagcgacctgaacctggcaggaaattatgtattttaagaaaaaaaaaacatgatacactcatgttcatagcagcataattcgcaacaaccaaaagcaccccaaatgtccatcaacgaatgaatggataaaccaaatgtggtatatccatatactggaatattattcagccttgaaaaggaagaaactttgatacatgctacaacatggataaaccttgacgacaatatgctaagtgaaagaagccagtcactaaaagacaagtgctgtatgattctacttatatgagggacctagagtagaacaaattcatagagacagaacagaagagtgaattccaggaacttgggtcggggggagtggggagttgtttaatgggtggagcttcagggttgcaagttgaaaagagttctggagatgggttgcacaacaatgtgaatttaatttaaatcaatttaatgtgcacactaatgcatataacattactgaacagtactctaaacataagacggtaaattttatgttatgaatatgtgatcacagttaaaaaaaaatatgagggaggttgtttttgagtagacagttgctggaggaaggcacgtgagttgcagcctgaccagtgcgaccagtcctccttcaacagccccgcttgccttgaaaaggcgcccttactccgctcagggggcctgtcccgcgcggctggcacaggcgctcacaataacctcctaaagcggtgccagccgcacctccgcgcggccccggcacaagcagccaatgaacacgcggctgcgcccggcctcgcgcctccattggctgcgccccgccacccgctgccccgcaggttcccaagccgggtttaaaggggtagggcgcgggccagggccccaccatcgtttccccgcgcgcaggtccgcggggaggggcggcctgccgaccggcccaccccagggcgttcctgaagggcgtcctcggccgcccccaccgcctcccagatgtactatgcggtttcccaggcgcgcgtgaacgcggtccccgggaccatgctgcggccacagcggcccggagacttgcagctcggggcctccctctacgagctggtgggctacaggcagccgccctcctcctcctcctcctccacctcctccacctcctccacttcctcctcctccacgacggcccccctcctccccaaggctgcgcgcgagaagccggaggcgccggccgagcctccaggccccgggcccgggtcaggcgcgcacccgggcggcagcgcccggccggacgccaaggaggagcagcagcagcagctgcggcgcaagatcaacagccgcgagcggaagcgcatgcaggacctgaacctggccatggacgccctgcgcgaggtcatcctgccctactcagcggcgcactgccagggcgcgcccggccgcaagctctccaagatagccacgctgctgctcgcccgcaactacatcctactgctgggcagctcgctgcaggagctgcgccgcgcgctgggcgagggcgccgggcccgccgcgccgcgcctgctgctggccgggctgcccctgctcgccgccgcgcccggctccgtgctgctggcgcccggcgccgtaggaccccccgacgcgctgcgccccgccaagtacctgtcgctggcgctggacgagccgccgtgcggccagttcgctctccccggcggcggcgcaggcggccccggcctctgcacctgcgccgtgtgcaagttcccgcacctggtcccggccagcctgggcctggccgccgtgcaggcgcaattctccaagtgagggcgggcctgggcctggggcgcgacctcggcccggcctcccttcgctcagcttctccgcgcccctgctccctgcgtctgggagagcgaggccgagcaaggaaagcatttcgaaccttccagtccagaggaagggactgtcgggcacccccttccccgcccccacccctgggacgttaaagtgaccagagcggatgttcgatggcgcctcggggcagtttggggttctgggtcggttccagcggctttaggcagaaagtgctcgctctcacccagcacatctctctccttgtccctggagttgcgcgcttcgcggggccgatgtagaacttagggcgccttgccgtggttggcgcgccccgggtgcagcgagaggccatccccgagcgctacctccccggagcggagcacgccggctcccagtactaggggctgcgctcgagcagtggcgggggcggaggggtggttcttttccttctcctccgccagaggccacgggcgcccttgttcccgccggccaggtcctatcaaaggaggctgccggaactcaagaggcagaaaaagaccagttaggcggtgcagacggtctgggacgtggcagacggacggaccctcggcggacaggtggtcggcgtcggggtgcggtgggtaggggcgaggacaacgcagggtgcgctgggttgggacgtgggtccacttttgtagaccagctgtttggagagctgtatttaagactcgcgtatccagtgttttgtcgcagagagttttcgctcttaaatcctgggggtttcttagaaagcaacttagaactcgagattcacctttcgtttccctttccccaaaagtagcgtaaccaacatttaagcttgcttaaaaacgaaaaccaaccgccttgcatccagtgttcccgatttactaaaataggtaaccaggcgtctcacagtcgccgtcctgtcaagagcgctaatgaacgttctcattaacacgcaggagtaccgggagccctgaaccgcccgctgctcggcggatcccagctgcggtggcgacggcgggaaggcgctttccgctgttcctcagcgggccgggcccttgaccagcgcggcccgcaggtcttccttctcgccgtcttgcagttgaagagctacatacgtagtcagtttcgatttgttacagacgttaacaaattcctttacccaaggttatgctatgacctttccgcagtttactttgattttctatgtttaaggttttggttgttggtagtagccgaatttaactggcactttattttacttctaaccttgtttcctgacggtgtacagaatcaacaaaataaaacatttaaagtctgattttttacattttttgtctgatttgtttggtaataaaaaagtccttgtatcctagtggatttagaaccttggggtgaaggtaggtaaatgaccggggtcccaggttttaaaatgtgacttcctgatttgtaaaataatccaatgaacaggcaactgtagttcaagttcaggcattcgtgggaaatatgaggattataggtaagtgggtgggtgggatagagaatgggatagagaagggagagaggcaattccaggaattcattctttgccaagcttcaggcataggtcttttttaactacaacttcatcccctggaaaatgggttaagcaatacctttatcataaaattgtagctcaacatccttccaggatatccaccttttctatatccttggacagaagcttaataccacacaagcatgagcttcccgctgctgcacccacctaccccttatcatttaaatcaggttggaattgtcttcacctaagaggtgaagaaagctcttctgtctgtttggtgctcttaaaaagaatttggaaggctgacctgctcacattgcaataatgaaacactgcataattattaatgaaacccaaccactgtttaatgtaggggagtagtagagaagtagtgtcccctttaacctgaggaaaattaaagaaaacccagagatgacttactcaattttatccatgttggtttatctgaggcatatacacatttagagaaaatgagcaccactttggaggtgggggaaggaggtgggaggtggctggagagatggcattgcccggctaccatgctgtgtctatttccttaaggagaagtcaggacagggcatgggagaaggtgctctgtgcaccaactcattccaaaagaggatttctcatgcttcctagactctgccaccagcaaagtcaccacttttataaaaagtagatttgaactctggccttctgtttattcaatgcctttccttgcttaccttatatcttggcaaggggtaggggaaaaaagtgaaaatcaatgaaatcaaaagcaaattaggttctccttgaaacaaaaatacttctaagggattagaaacaaacaatttctcccactgtccaacaccagcacctagatgccactgtcattccagacatcatctctaaaaggagcccaaagctacagggcagaaaatgggtctgcccttctctacctgtaaatgggaacaagccgcccatgccttataggaaaagtaacactatatgtgtatgattttttttttatttaactaagaaaatcacagcctatcatgcttttcagaagggccaaaggctataaataaatttaacaaggacacacggggctgttttgggtgccatcaaaatacttatctgcctgcacgtagcgtgcttttggccgttgtgccaagcaagattagcagacttgctctatagaaggagtttacatcctaaaaaatagtaccagcaagcattgaagagtcctgtaggatgaaacagataaaaggtaattatatacagtgtccacaatgcaaagtcagactgctcaacatctgtctatggcagggcagtgtattctgcatgcagagtttaagcttagacatgtgtgttctagagcatggagctgcttttagaaatgttcagtgctatgtcacgccagcaaaggagctagctgaattgtccaccatacttgattttagctggagtgggctttgttcagaaggaacaagtgtaagctagcctttgaagggtttgggacagctgggagggtcttagtaaggttcctcaagaaaggcactctaagagctcagaagcaagatgagaaggaacccacggctcactgccaaaaaagttccctgcatccagccaaccaccaaagtgaggtcctggcaattagagtaaactgaacctaatgggaaaatacacaaggccctgagaaattatattgttatatatattggagtccaggtgagcaatcagtagacagagggcagaatcaatacacgatgggatttgcctagcccgcagtgatggtctacttacagatgttctcctctaagggaaactgatgacactagacataaaaatttaactttgtgaaatatacagcttagagggtaagtggctgcttcgaggaagaggctcctctccaatcatggaaaatgtttccacttactgaagtttagaagatgaacgacaatgcttccatcttgcactccactttaaggtgtttggtctttcctgaatgcttaggtacgcaggtgaggctgggtacaagagagcctcagcctgctaactagaccccctggagcctcctgttgtgtttaggaagccagccaggaaaaaaaggggcttttcttttctgccatagaaggatacctgatgaacttgccaagagcaaggtgatggttgggaagagtcattcaattgacacttttgctccctgggtatgcagtgcattgactaggaaagtatatttccctcagaaggtattttcctgcttcttcactgcctcttttctcttctgcacacacaataaatattcaataagaagattaccacattcactgaagtaggctcacaaagcaatggggtgaaaaatgccatgtttttcaaaaacatgaattcacttttctccagcagatttttaggtgtggggaaagacgttagaaatactgtttccaagtaagatccagttaacgtgcaaaactggagtagcaagatattcctcaaaacctgcacacaaactagtctcgttatttatggagacatcggaaaatcattcttaaggcagttcccattctgtcatttttaactaagcccagcgtaaaagctgacatgcctgaaaagaaaccaaaccacattctttctgctcacacgggattaggagctctccgcaaactctcccccttccctcctgctgctgttgacaggccaggctctgagctcaggacaaggagctgaatattccaagtccttaaacactacaggctgcatgacgcttttgtgtgtgtgggggggtgggggtggggggggaatgccttgattgaaagcaaaaagaatgcattctacgtccatgctaagccttctgcggtgaccaccgaggacagagcacgcaagtaggccactacctgggacaaaggccgcaggtaccaaatcatatctgagtctcatgaatgctggcaggcaaaggcagttgcaaatcatccattctctcttctccctactgaataaggcaaccgaggcccaggatggtcgggaaccacagtcaaagccacacaggtggtcagaggcagtaatgccagggactagcgcctgctttggggaagcacgggctgcttccttggtctgtcctggtgagacaaggaatgggaatcccaacaggaggtccccacccagagctgagcatgttcttctgccctcccctggaaaatctcggtcctctggtctcttccagcctctctgctcagcctgtaggctggccctgctggtggcatccaggagagataggctcaggacaaatcccttgctggctgacctgactgcagttgagtcacctgaactttctcggcagcctcgccccctagccccaagagaggcccagactggtgacagggagtggcagaggcaaggccacctctgtgagagatcctctgacggttgcaggtttgtcattcgagtttctgaaagtgagcaagcagacggctgacagacaagggcagcagggtgcaaggagaaaacggcttctgaaggcacagcttcagagactttctcctcctggctgcctcacagtgttttcatgtggaaactagacattctgaccctgctggaacctgtgtcaacgtcgtcggcatctttttgttgagtgtttttcatggacacgagtgattccccaacaggcccctctgcagtggtggcctgaaatagaggacagacgcccctgacaggccctgtacctggagcaccagtccaaggcaagccatggggcccaggaaacaggctcccagcactgggattcaataagggctgttgtgtcccagaagcttctaagtgatgtgggtagctccttagagaatgccaaagtcataggacctggagacttcaaaatcacaagagcagatgagaagacttgtctgtgaggttaaaaagaaagaaaaaagaaaagccaactcacctgggggcaggcaggtgggaaggagaagctactctgcagaaatggcagagcattactaccagaaataaaaataacaatggtgctgataagagctcattgtgttatcgggcaccaagcagggttgtaagcattttacatgcatgctttcattttgtaggcaccagcgttatccccattttacagatgagaaaacagaaacatgaagatacagagacagaagaagctgaagccagttcagggaagttgtagcagccagacacagaaagaaatgaggctctgtctagaagaaagagagcccccaagggttgtcctctctgtcattgctgtaatgtggagaggggtcattttccttcctccccttagctcttggggcaaggctgggaaaccccacctgtaccccagtgcccgccccatgcctggctgtggctgcttctattaattgcatgtctaaccaatgcatgatccaggcgtcaacgtctcgccactccctgtctcctctttcttgagcctgagaccatggggtcattcttttaggtcatttcacttttagctttctttttttttcagtttcactttttcatttttatctgatttttatttccaaaatgttcagacctggcggagactgatctaagaatgtgagtagtgagatgtcagggattgcggatggggcagaagggaggcttcacgcagcccgcacccttcaacacatacatgctcctcgtcctggtcaccactgagtgttacaggcaagaaaataaaaaccctaaactcctcagacagtgatcattaggtgtcattctgttcaaatcttaaaaaatagtttgagcagatgaagaatcagtaaagaaagcttggaggtgatttgataacattttatctacccagaggaccaatcaaagagagtatttgtattgtggtgatggtggtgatggtggtggtggtggtggtggtggtcgtggtgctggttttgttccatttgcttgcttccggtggcttcactcacatgcttcctctgcagtcctggttccccacagccatgggcagaaggtacagcctatatatgagtctctatcagtgcacaggtgtccagtgtaggaaaaaataaaatggaacattacagcaccccgtttaatagacaacttttgaattcacttatgaccatggtctccatggttctaggggctgtgagggcatcagagatgccttttgtattttatattcacacagactcacagtaactcagatggagggctgtaggctttgaaccatgaactgccccagcgaggctgttggggaaggcgtgcagggctggctgctgtaacagacctggccacaggagatgggagagatggatgctcaaccttccccctcccatcctccgctcataagaaccctactgtgtccaaacacaatcaggcaccaatctcctctcccatcctcctgtcttccctcctcctggtcatctcttccctttaagatcctggctgtgtgttgcccgatttggtcgtgcctccagttggtcactccactccatggctcatgtaggctcatgtgtgacctcagtaggctacttgagctctggtgcctcagtctcctcctctgtaaggtcagggtaataacaggacccacctccttgggggttaaatgaggcagtgggataaaccgttaagcatagtgcctattgtacctgccaatgcttttcttgttgccactgatagaattttttccattgtctggaaattatttccatggtgatgtgtactgtgacagctgctttcaaaggcactagtgtgaggccaggcgcggtggctcatgcctgtaatcccagcactttgggagtctgagatgggaggatggcttcagcccaggagttcaagaccagcttgggcaacatggcaaaaccccgtttctacaaaaaatacaaaaacttagtggcatggtgtgttgtggtgtgcttgtagttccagccactggggaggctgagttgggagaatcacctgagtccaggaagctgaggctgcagtgaactgtgatcacaccactgtactctggcctgggcaacagagtaagactctgtctcaaaagaaaaaaaaaaaagcaccagtgtatgctccgtcattcccatcttctcttgcaatctattaagagggtccatgacagcatcagatggtaccaagtaagaatgcatttggaatgagcaaagctgccttctaaactcctcagctccttccagctctatctggacccccacagtattttttgaggggcttctatgagggatccccatgccagggtccattcttccacgcttggggtcagagccctgctagggccccctgctgtggtctgtcccgcacccacatggaagccaaaatgcctctcagagggagctggggggcagcaccagaaccttccttgtcctcacgcttgactagcagacaatgggttcttcagaagccacagcatttcagctgttttggccccagaggccacaagctgactgcatgtcattctccaccagcagagcgtcacctcggggtagctccaaacagtatcaaccggtttgtggtgagtggataaacaccaggctgggtgaatgaagtcacaggctgagtcatcctctgcacatgggggctgaatggggctcagtcaggcccagaggagcctccccggcaaggtgctgggggccaggctctccctgccagtgaggctggggtccgtccccaatagtcattcctttggccaacaaacacttattgagcgcccacctactaggtgttggcacgagtgagtggttaataagtgagcgattatttctcaaaatagattttgtggtcatctaaattcagagcatgttacccaaagcaggtttcagcctgtgtttcctacacagaaacacttgttaaaataaaaaaggaaagaaaagaaaagggaagggaagggaagggaaaggaagggaagggaagggagaaccaagattttattaatgttaaggttttaaatagtaactatattttggttcagactcattaattaatttgccatttcaaactggttgacaggacagagtcagaaaaatattctgattaagttaattaagtttgtctcccaaagtaaaatacaatagttagattagaactgctttttgctacctgggtcttaaggagaaagtgggccttgagaagcaaatagggccaggatgaggtaagtgaggcacttcctttgggcacaaaattgaagggggcaccaaaaaactcagctatcatgataaagagtattttaatacaatttttttgtaaaggctgagcacagtggctcacgcctgtaatcccagcattttgggaggccaaggcgggtggatcacctgaggtcaggagttcaagaccagcctggccaacatggtgaaatcccatctctattaaaaatacaaaaattagccgggcatggtggcaggcacctgtagtcccagatactcaggaggctgaggcacgagaatctcttgaacctgggaggcggaggtatgcagtgagctgagatggtgccactgcactccagtctggagtgagactcagtctcaatttaaaatatatatattttttattaaaatatatatatattttaataaaatatatatatattttaataaaaaatatatatatacatacacacataaacatatatacacacacgtatatacacacgcatatgtgtgtatatatataaaatcaaaattgatgcagaaattcatgatgaacaaaatataaaatgtttaaatacagacaggagcagtgctaccaatttttctcagattccaacagcaaacgccctgctctcctccccctagtttcccacagctgccccactgtccctgcacacccttggccagatgggggaaaagctgatattagctcacagaaatgacagccaggcactgggcgaattcaaatctccacagacattgcctctgctggctgattccaggacagtgtgacagggtgtcacaggggtggcgctgtgtcctggtggagagccctggcatcaggaggtctctgccttcaaatccctgtcccacccttcctagcttccttaccttgtgctttagctctttaagccttgacatcttcatctgtaaaatgggggtgataatgtgttgatctcatgggattcaatgaggcacacaagggctcagcagagctcctggaaccattatcattgtagacatgtccacgggcaaatctcatcccctccactctgggtgggagctgcatttcctctgttgagggaatgactcctattccattcagctgttactggggagacctgtggggcagctcctcgtgaggaatgcaggatttgtgataccacatatgtgagtttgttttgttttgctttaagcaaacctctagaaatagtcctagtagtagcagtagcaataatagcgcttagcacttttgctgagcattttctcaggatgctagttagtgccaggcctgtgctaaggcctgtgttgagcccaacaagagagacagcaggtggtgaggctggagtgagctgttgtcctggggcccatcccatccagcaaacttctggcctcaatgtctgaagcctggggtgtgagctaacatcagcttttcccccatctgggcgagggtgggcaggtgtgtgtggggtgggggcaagcacccccctcgaccaggcctaggtcttcagccctggctctgtgcttcccaacccccccattcccccctcaccaggtggcagcatatcaccccgggctgggaagcctgttgactcctggggccactgaatcacagcacccttgaaaatcaaacatagtgagccatggaacatggccccatgtcacctgaattggaaaaataaaggggttttgttttccaagcaatggctgatgctcacaacaaactgctgcccctcacaccaaaatcttaaatcttgtcttgggagatggttcaccaagacaaggaacagacagcttatctttaatgctgctgttgtctgaaagactccggagtgtgttcagtgttacactcagattttaaaatcaatccattcatttgaaaaatgcttgccatgggccttgtaaaaaggcacaatgggcatgagtgaacgcggggacccttgataaccctaaacagcctcttcagctggaataactccatccccttccccgaaaaacttggattttgtttgcttttaaaattaggccaggcacagtggctcatgcctgtaatcccagcactttgggaggccaaggcgggtgaatcacttgaggtcaggagttcaagaacagcctgaccaacatggtgaaaccttgtctctactaaaaatacaaaaattagccgggtgtggtggtgtgcacctgtgatcccagctacttgggaggctgaggcaggagaatcgcttgaacccaggaggcggaggttgcagtgagcggagattgcaccgttgtactccagcctgggtgacagagccaaactctgcctgaaaaaaaaaatttttttttgaattaaattaaacacatacacaccacacagaattttaaaaagagcccccatgtgagaatttgttaatcatgcttggctattgtagatcaaatgacattccatgattcacaactgaaacagtgttaaagcctttaaaacaagattcacagacactgggtcacagtccacacattacacatggcattcatagtcagcgataccaggatgacggttttaccatttctaccttgaaaccgttgtggagagaaagaaagggagagtttgcagctactctcaatagcaatttttgaaatagagatcttccttattattattattattattattattattattattattattattttgagacggagtcttgctctgtcgccaggctggagtgcagtgttgcgatctcagctcactgcaacctccatcttatgggttcaaacgattcccctgcctctgccttccaagtagctgggactacagatgagcaccaccatgcccagctattttagtagagccagagtttcaccatgttggccaggatggtctccatctcctaacctcatgatctgcccatcttggcctcccaaagtgctgggattacaggcgtgagccacggcgcctggccccattatttttttgaatagtaaagggattacatgtactcattgtaaatgagttagaccattttaaaaacaatgcagaagacaaaaattttctataatctcactactctgagaaagccactgctcatgataccctgatataggtagttacaggttttcttatttgcatatgcacacatataatcaaatatatgatacagattggaattaaactacacaggcaggcttatagtcggctttattcatttagtaatatattgtgatacctttcagtgccaataaatgtacccttatataaccctttcaactgaggatctcaatgtatgctatcctgtgattttatttatttatgagaagtttttactctgtcacccaggctggagtgcagtggcacaatcatagttcattgcagcctcgaccacctgggttcaagcgatcctcccacttcagcctcctgagtagctgggactacaggcctgagccaccacacctggcctaccctgtgacttattgaaatatctccctataaatgaacatttcatcccccctcaacatttttatataaatcagacagtaatgaacatccttccacatacatagatatgttctaaatcagtttctccttggattaacttctagggtagaatcagcaaatgtatgtcgtcaagtaggtccctccagcaaggcagaatcaatctacactcccacctggagaacccgagaacgtgtgacccagtggccttggcagcactgggtgtttttctttttttttttttttggtggagtcttgctctgttgcccaggctggagtgcaatggcacgatctcggctcactgtaactctccacttcctcggttcaagtgattctcctgtctcagcctcccaagtagctgggattacaggcacctgccatcatgcccagctaatttttgtatttttcgtagtgatggggtttcgcaatgttagcaaggctggtcttgaactcctgacctcaggtgacctgcctgcctcagcctcccaaagttttgggattacaggcatgagccactgtgcccagcgggtgtttttcttttaaattatgtttttgtgtttatttattattttatatctttctatgattatagcacctatgcaagatcattgtagaatttcaaacattatcaatgtatataaagtaaaattccctccctgagttctcctatcctagttccacacctgcatataacctgattgtatttcttccaaattttcctttcaatgcccacactaaaaagaatttcgttttgccacaaaaatagtatattattaagattggcaacttgcctttttctttgtgtacttccacataggctgtggttttctttccacatcatttatacataggccccattttgtagcggctgctacatgttccacagaatggacataacctgtccctcgtggagggccattttcattattttcagtatttgcaataatatacttgctcacatagtttggcatgtgcatgggacttcctatctatgatcattcctagaaaaacactagtgctgaagagtttgcgtgtttgaaatgcccatagctgttgtcaaattgccctccaaaatgaacattcctgccaacaataatgaaagcacctgtttccatcagggtctttaaacagggattagctgttcacttagcaggcatatgtggtagacatgttttctgttgatgtttaccagtttatgataaaggatattgcaaaggatccaggtgaaggaggacagtggcatggcatgaaggagggccccagagctcctacgttgtctccaggtgccccttcctctggcaccttcatgtgttcaccctgtagatatattttctggaaagtggggagaaccaacctagtagttctgcgaggatcccttagacatcttcactcacctgaggttacggtgccctgtcctctctccgtcttccacctcatctcacacacatatacatttgcaaggttatgcttgacaccatcagcaatatttatgatttgttcataagataggatcagcattaaatgacccaccctctacccagatcaaccaattgcagacaggcagatgcataactcactttcatacaatttgagaatttctaattttccacttctgtaagagaggaacacagttggtccttcataacccaccactgggagatggtttaaagaccatcatacagcattattgaaatacatcaggcctacattgtccaatatggcagctcctaggaacatggaactcctgagcactggaaatgtgtccatccaaattgggatgtgccacaggtgtgaaatacatactagaaatacatactttttcataggaagaaaaaaaagtaaactatctcaataatttttgtattgattacaagctgaaatggtaacctcttagaaatactggttaaatgaaacacactattaaaattaattttatgtttcttttcattgtttaacatagctactggaacatttaaaattacatatgtggcttgtattctatttctactgggtggcattgctctaagttgtttgtacagctgcagatatacatcgaggctttgtgtgtgtgtgcttatttctgctctctctctctctctctctctctgtctctctttctctcttcattccttcaactcagttcaacaatctaatttgcagagatgactatttcaaagatgacacctgtcactttggctgtctggtatatgaaccaacggtgtgctggcaaaatggctctctgaaggaacagcaaagccccagtttgtcatttttgcccatttctgtggtgtaaatactcccatcactgccaaatccaggctgccaatatgatgtccctgaacctggaactgggaagagacaagcgttctggtgagtgggtcctgccagctccagcacaccatgggttatgagtcctcttcttatgaattcccagccacacaaaaggcagggctcccatggcccctctggaagccaaaggtggcatctgtttcctccccccaaccctggacacctatagcttgggcccatgggctatgggaggccaatcaaatgctcctacccaggatgttggatctcaaggggttgatggacaggcagggggcttatttgagaacatctgtggtggctgcagcagactcaagctttcagaggaatggagatgagcacctgtggggggtagtggagaccaccggggctagagtccagtggtggaatccagctgtgatagcagctactgtctcgtggcaatggggacagtggtggcatccaaggtagactactcctgcagcaggatctcacttgtccttgttacccctgaagcaggttcctcagcctccaccttgagttgatgagctggccactctccctccattgattccttttctgctaggtcacctagagtcagaaacttgcactaggcatttacctgtaacagtcaggtgatgtaacaggcgatgtggctgaaatgcagtgcagagaagggaccggctaccgccaggtgagagacgttctgaaagcagagggctcattagaatcatcacctttaaaaacaggcatgtccagaattgaaaacagggactcagatatttctacatccaagttcacggcagcattattcacaatagccaaaaggcagaagcaacccaagtgtccactgacatatacatggatgcacaaaatgtggtgtatctatacaattgaatattattcagccttaaaaaggaaggaagggctgggtgagggggctcacacctgtaatcccagcactttgggaggcagaggctggtggatcacgaggtcagaagatcaagaccagcctggctaacacagtgaaaccccatctctactaaaaatacaaaaattagtcgggtgtggtggcgtgcacctgtagtcccagctactcaggaggctgaggcaggagaaccacttgaacccgggaggcggagtttgcagtgagctgagattgtgccactgcactccagcctgggcgacagagagagactccatctcaaaaaaaaaaaaaaaaaaaaaaaaaagaaaggaaatcctgacacatgctacaacatagataaatcttgaggacattatgctaagtgacataagccagtcacagaaagacagatactgcatgattctgcttacatgatgttcctagagtagaacaaattcatagacagggaacatagagtggtggtttccaggagctggggggaatgagaagctgtttaatggggacagagttccagttttgcaagatgagaggagctctgcagatggatggtgatgatggctgcatagcaatgtgtatcttcttaacgtcattgaattgcacgcttaaacaatggttaagacagtaagctttacttatgaatattttaccgcagcaaaatataatttcagcctgggcacagtagctcgcacctgtaatgccagcactttgggaggcccaggaggatcactagagcccagaagttcaagaccaacctgggcaatacagcaatacctaatttctactaaaaaaaaaaaaaaattagctgggcatggtggcacacacatgtagccccagctaatggggaggatcccttgagcccaggagtttgaggctgcagtgagctttgatcacaccactgcactccagcctgggtgagagagcaaaatgctgcctcaaaatcataagaataataattttataaaaacaggcacacatctagtttccactcctgaagaactttgagctgggattgacgctgggtgggtatgcagtttctaaaactccacgggcgagaacagccaattgtgcatggctgcccagggatggaacgacttgactcgagagggtccagtgtcaatggctgtgctgcctgagagtctccagtttctagactagtttctaaaccaaaggcagcctcaagtgcctgtgggttaaagcagctgcaggtgtatgttgaactaattcaactaagttgaactctatcaactaaatgaattagtcatcaacatttgcaaattggaagattttacatgacaaatgcagattttgaatttctctagaaaaattagaagacatggccgcaccggcccagcttccacatggcccagtaagttagagctgagggaggataaccgcctcgggcctcagtctcctctattcccttctgcactaccccagcccacctcagctgctctccgacattctaggtttgtgattcacacttgaaataagcaagctgacctgtgccaagagctccagtccctttaaactctgcttctgtcttcaagtagcttacaaaatcgtgcccagattaatggataaataaatagtatgagttacaaatgccaaaataatacagacagataccaaaagcccaatcctcgctttaattttgtcactgatttctgaagcaacgctgttttgctaaactgtaaacatgggctgtcactctaacatttaaattcttctttattttttattctttgttgatttaacaggcgtcagcattgaaacaaattcataaagtcagtcttggatcttatttactgaggtttccatttcaaagaaacctggaatactcagatttatcttggctggcagaaggtgatggaggcttgcgggggttgttgggagagtggatataaaaatcatgagtcctttttttttgaaaagcaaaatatggggctccctcaagccactgcacaatgatctcaaccccatcaataagggtgatcatcgaagctccttcctgatttgggagcctgtattcagggaattaccctgggaatattcacaacgggctcagccaggaatagctggaatacttcccagggggcgggagagccatgatgccaagtctcagactctctttgacgatgctattttttcctctcaaattacatcatttctaatcatttcccataggctttctagatttaaaaagaaggagaaaaaggagggaatttggaggccgtgaggacattagtatccattttctaatttttatttttcaactatcacccttttaacatgagatcccaatgctgccttcccgtctgacctggagacatacagggaccacagacacaaggcctgaaaaatcagtcgcttcagtttggaggggcagctccggtagaaaagatacctccgcttcaaaacccaatgggcctcaaacttcttagctcgcttcctaaagtcagcacagtgctcacagttggcctgtgggcctgcacagtaatcccataaacacacgcatgtttgtcctaaagactgatcatctcctcaggccacctgtggcgggagcttccatagcggctctctgcaggtccatagcagggccatagtgagaagcggcctgccaggagactttctgattccatcttgagctgtcacatggggttccagccgcacaacccctataagagcatgccaggctccctgtgggcccagggacagtttcctttagggaagcaggtattatttatatcatcaaagcagactagattatgcaatgtcatttcaaattggcataaacagattcatgatagcacaaggttatctgttgaaaataatcttcgagtttggtagaagtgaagggtttcaaccgtgtgtttcaaccgttgttagactgtttggctgaatgaaatatgtgactaatgcctatacctagctggcttctccatcttccagcgggagctggggaacctctcaaaaaagtagacatatgacctgtattagtcacggttctctagagggacaggacgaataggatagatgtatatatgaaggggagtttattaaagggaattgactcatgagatcacaaggtgaagtcccacaacaggccatctgcaagctggggaacaaggaagccagtccaagtcccaaaacctcaaaaatagggaagctgacagtgcaggcttcagtctgtggctgaaagcccaagagcccctggcaaaccactggtgtaagcccaagagcccaaaagctgaaggacttggagtccagtgtttgagggcaggaagcatccagcatgggagaaagatgaaggccggaagactcagccactctagtccttctaacttctcctgcctgctttatgctagcctccctggcagctgattagatagatggtgcccacccagattaagggtgggtctgcctctcccagtccatggactcaaatgataatctcctttggcaacagcctcacagacacacccagaacaatactttgcatccttcaatccagtcaagttgacattcagtattaaccatcacactacccaatacatgtgttgcattctgctgagtgctttttttttttttttttttttaaagacagggtctccatctattgccccagtctggagtgcagtgatgtgatcttggcttggctcactgcaacctctgcctcccgggttcaagtgattctcctgcctcagcctcctgagtagctgagattacaggggtgagccaccacacctggctaatttttgtatttttagtagagatggggtttcaccatattggccagtctggtctcgaactcctgatctcaagtgatccgcccaccttagcctcccaaagtactgggattacaggcgtgagccactgcacccagcctgctgagtgcttttgattaacatttatcagtctggtgagcaaaatccctgtaggataggatatcaaaaacacagaaattcccattcccaaccggtggctagtcacccaagaccaaccccctcaacttgcccccaagcttgctctatttcccccttcttccctcaggcactgcatttgccaacaccgcacttgccactctcctgccttcacagctgctcacactgccactctttccgccatccagtcagcctccctgtgccccctttgtccctccaaaagagtcctacaaactcttcagacttggctccaatgccggccccatgcctctctgaccacttaggcagaggcaacctccctctcccttgcatgtcctccagggcaggggtgagatctcacttcaccttgcaccctccagggaccctgaaaatagggcagaccctggataaacatggggaggagagagggagatagcaggggaaggaagataaggcaggacagaggatgcagtgagaaagacagagaggaaggcaggttattagagtcaggtagcagaatgcgatcttaatctaactgcttcaattgtgtattcaaatagaaaacaagaccattccaaaaagtaaactccttcccagatctctgaagaatttatataatggaattgaaactttgagaacacaatgccaatagctcctctggctaccaatcttatgctgtgaaataaataaatgatgtgagggctttgcttagggatacccagggctacaaaatgcaaaagaaatgtgcatttcaaacacaggaaaggccagttccacaggccacatgggtgcccgaggaagctctagtcttcttattttatgaacatataattcatctttctatttcctggcatctgctcttatttcattaagatattcactctttggcttctctctcccaggaattaggggtgaaggataggccatgcctgaactaaaacaaacactttgtggagcttgccccactcaatccatttaaaatcaactcctactatagatggtgtttgctgaggattgtgactttgtttgtttgtttgtttgtttgtttgagatggagacttgctcttgtcgcccaggctggagtgcagtggcgcgatctcagctcactgcaacctccgcctctcaggttcaagcgattctcctgctgcagcctcccaagtagctggaattacaggcacccaccaccatgcctggctaatttttgtatttttagtagagacggggtttcgccatattagccaggctggtctcgaactcctgacctcaggtgatccgcctatctcagcctcccaaagtactgggattacaggtgtgagccaccacgcccagccagaggattgtgacttttatagaactggtgacttacttttaattaacacagtgttacaagaaatgtatctgaggctgagatagttttagcatttttcttctatttttcagcacaactttaaaacattcctcttttatacttggcaaaatgctttagaaaccttttcttaaaaattatatgtctgagtggctgaggtgggcaggatcaggagttcaagatgtgcctgaacaacatggtgaaaccccatctctacaaaaaacacaaaaactaaccaggcatagtggcgtgtgcctgtagtcccagctactcgggagggtgaggtgggaggatcgcttgagccatggagctcaaggttgcagtgagctgagactgtgccactacactccagcctggatgatagagtgagtctctgtctcaaaaaaaaaaaaaaaaaaaaaaaaaagaattatacgtttaatcccatatttaacttcgcataaactaaaactaaaatcagcaattcccattcaataaggtagcagaaccatcatcatgtatagataattcagatacattcaattgtaataaattcacacaggcttcaagctcgaaagtatcctggaattgagagcccagcaacacagcagtaatatgggcagtaacaagtcccagctctgcatgaagaagtgaagagcctgatgtaacttacacaagctttgatcttgtgtgtgtatcttgaacatgtgataattcacagcagtaatgtgattttgagccactaaatgacaatgtgtgattgcttcttttttttcctcctattgatttattttgagatggagtctcgctctgtcacccaggctggagtgcagtggcatgatctccactcactgcaacctccgcttcccaggttcaagtgatcctcctgcctcagcctccgaagtaggtaggattacaggcacgtgccaccgtgcctaatttttgtatttttagtagagatggggtttcaccatgttggccaagctggtctcgaactctgtcctcaagtgatccacccacctcaaccttccaaagtgctgggattataggcatgagccaccacgtccagcccttattttttattttgatcgtctttctgccaggtcctgggaggctttttggggtgctggtgtctgtgttgattcccccactcctgtacacacccgtctgcttgcgtgggatccactgggtagcgtcacagttgaccagacagaactttctaatcagttttccaaagccgtgatgagggtttggtgttttcttctgagaatctcactttcacagtgtttcccccaccaaatgcagtgaaattcagcgtctttttttggttttgtttttgtttttttctgaagctcttagaaaacagcactcaggaaacgcaccaactgggcaacctctatcttacccactaatcctacctttgaggatctttcctgaggaaataataaggcatgttacctagttacaccctttataataggaaaatatatataaaatgaaaaaatatacaaaggaaaaaataatataatgagaaaaaatcacagtaccttttataataggaaatagctggaaacaacctaaatatccaaaaatgtaagatagtatcaaataattaagataaagtcataggataaaattctatgccaccccctggggtgaaattttataagaatattaaatgttagaggaaaatgattctaatatcagtgaaaaagtaaattataaagcagtgtgattccaaatacctaactacttgttgacagtggttatctctgagtggttgtgtaagaatgctttatgtttgcttcttttgttctatatacattttctaaaatttctttaatgaaaacattctatcttcaatgtaatgtttaaaaagagaagctggaaatgataatgcctggactccctttgctcacattcagaatctcctttgcaaaggccagacccaggctcacggctgatgccgccaaaggtgttcagtagaccctggcatggataccggggcaggttcctggctggcgacggggtgcccctgggtaaagctcccctccagagggtgcccccatgaccagggctttgctggaagcagccttctgatgagacgctaccagattagacagacacttcctgattagacactgtattttacctggaacctaactgattggacggtcatacttattatcttagtttcttcttttaaaaaatgataataagaatatttagtgacatagaaaaatgtttatttacatggtgaaggaagcagattaagaaaatgtacactcctaattatatataatatatataatgataaattaatgtgtttcttagttctgacaaatgtattgtagttaggtaagctgttaacaatagggaaaactgggtgaggagtataggggagctctctgaactatttttgcaacatttctgtaaacttaaaattattccaaaataaaaggtttattttaaaataagggaacttattcactgtagggcacacatttctcagggcctcaattatttaacatttaatttaataaaacactttggaaatccaaaaaaattacgtatgtatttttatctgtattacaagtctattcacatgtaagttatagaagaaagctattctagaaaatacaccaaaacaggccgggcacggtggctcacactagtaatcccagcactttgggaagccgaggcaggcggatcacctgaggttgggagtttgagaccagcctgaccaatatggagaaaccctgtctctactaaaaatacaaaactagccgggcgtggtggcgcattgcctaatcccagctacttgggaggctgaggcaggagaattgcttgaaccagggaggcggaggttgcagtgagccgagatcgcaccattgcactccagcctgggcaacaagagcgaaactccgtctaaaaaaaaagaaaagaaaagaaaatacaccaaaataataacaacagctatatctgtgggatttagaatgatttttattttttctttagtttttccaaacttttaagattttcctataagaaaactcttctataattattacctatataattctgtagtatatacattatattatataatatataaaaataaaattacttttatgagattgcttttaaaatcagaaaaaatttaaaatagccacgtggattttccaagagtcccaccagcagctgtgaggctgagagtgtgtaaagccgggcaaagctattggcaggaggaggcagctatgcacgggctctgggtatcgttcacactggaggtactatatgtgcttaatatggactaggcatgagcagctaatagtgcttttagaaccacaaagtcaaattgataatgatagcattcctaatttagcacaatgaaaagcctggtaactattgcccgagctaatgaatgggtaagagaaagaaaagcttcttttcttttgtaaagcttaacattaaaattagctgcatctgttacctttggtgcaaaaagcaaagacggaagaaaccctgttccagttggtattttgcctctgagatctttatgcctgagctcttcaagtcgcagataacagtgaaggccctaagactcaccatccaaaacagttttggaaaaaaaccaaagaagagaaaataatttcaaaccttaaagcaatgcatggtgattctctggggggtctaagaatttctcccagagaaatgataaggcagacaaatggaagatcaatgaagcaacatcgtggcaataatgcaattggtcctgccgtagtcatgaacatgtaaataacaagacagcaataagaagaccccagactctgcctagaaacaaaatattcagcctgttgttgttgtttcttattgcaggattttgagtggaaaagtagttccacttgtcaatcagctacgttgcaggggctaatagattctggtgtttagggaggtcaacacggaatttaatttaacatctcacaatacacccacatgcccagaaaatgtggacagcttgatagggttcactgagccaaagaagcaagacccaaacagtgcattaatgtataggggaagaatagttgcaatcagccccttgtgaattggacagagggcttggagatgaagcaattatcagccatcggggattaatagtaaagtgtgaataccaagctgtatatgttaggggcagaatatgttgcctatagaaaacaacaaaggacgtttcttactattaagtgagattaaacgtaatggcctgatttaatcacaaaggcagaattaaattcagatggcaacttcaaagtggacacaggaacacaggccactgcttacatttacatatagctggcatagcttggcctgcaacacaataggataaagtttctttggccacttaaacaattttctattcttcacctttttctttttttctttttttttcttttgtgggtgtgtgtgtgtgtgtgtgtgtgaacactcactgtatttattccccaattgcatttagttagtaagaaggagctaagtgttatatttattcatggaggctataactgttaattcttccaaattgtgaaaaaaaagcctcatagggtcaataagaacagagtagttataatcagattgtcaccaaaaaagaaaaagaagaaaagcaattaaacaaaacaaacaaacaaaactttctagagtgaacagtgtcttctaactttctctcccttcaacttaagaattcagctcttgaggtctaaacttcgctcccgggaaaggcagctttccccctcctcgggtggagatttatgccaccatcatggagcccagccgagctgtttttcaatacaagccagttcctctttccttctttgttaatgaaggcttgtttccttctttgctccccaccgaaaaggcagttctcctaagaggtttgggggatagaagcctgttgcagggtttagaggggttgaggcacttactgagagtgggtccccagggaatttccagtacccacaggttgaatgtaaaaattaagtatagtaactaaaagacatgctggcctctgtccaatgcccaaggactgaatacatctaaacttttcgggtccataaaagtcccttgcaaattttatgtatttctagtttataatagataatgtattatatattatatacattatatattatataaatgattaatgagcccagcctttgaacctacaatctttcttcaaataatttattcttcgtaggcatagcaaaagagcttaaagatctttgtatcaggacattcatcacaaagtttctccttttttccccaagacagtctcactctgcggcccagctgaagtgcaagggcacaatcatagctcactgcagcctggagctcctgggatcaagcgatcctcctgcctaagcctcctgagcaactgggactacagatgcgccccaccacacccagataattcttttttttttttttttttttttgagatggagtcttgctctgtcacccaggctagagtgcagtggctgcagtctcggctcactgcaagctccacctcctgggttcacgccattctcctgcctcagcctcccgagtagctgggactacaggcacccaccaccatgcccagctgatttttgtatttttagttgagacagggtttcaccgtgttagccaggatggtctcgatctcctgacctcatgatccgctcgcctcggcctcccaaagtgctgggattacaggcatgagccaccgcacccagccacacccagataattcttaaaaatttttgtagagacaatgtctagctttgtttcccaggctggtctcaaactcttgggctcaagcaatcctcctgccttggcctcccaaagtgctaggattacaggcttcagccactgtacctggccagtttcttttaatgttaaaaccaaataggaattagctaaaatgactatccttatgggataagcttaacaaactttgctatgaacttataatgaaatactatgcaatcattataatgatctgaatttgaaataatctgaaatgatttgaaataatgatctggagctttagttgattagagagacagatacagaaagaagcctatagcaatttgtagaattcaatgtgtaaaaagagaaatgtttgagaaaatgtcagccaaatgttaacagtatttttctccaaatggtgggacttggttgatttttattttttccttggtactaactgactttttttttttttttttttttacaattaacacaaattgcttttacaataaaatctctattttatttttttaaaaaaattttttgagaggctttggtgagcatttgggaaatgactttaaagggagaagaggggatttttctgaggccaaaatgaaggaaaaggtatcataaatctttggtgtttgggcctctgcaagacaggcatctcaccccgtcctgatgagcctgggtcccgggaccacttgcttctgcaacttgccttttctcaaagtcctacttttgggtttaaagcatttctcttccttttttgtcattgccttcttgcgttgacagagattttctgagtttgatttgccccttgaaaagaatagattgatcatctgtaaagacgttgcaatcagatgtcaaaccaatccaatcgaggaaaaaggctgggagaggtgagtttgtgagggagaggtagagcatggatcaactcctctgtcaccagacaaagctaatgtgcaatggcctgtggctttcttttgagcgattcactaatcaatgtaaatgcaggctctaaggtcggacaagctgaagtgtctgggggccttggtaacttgcccaacatccagtgtgaccaagaaaaatactccccaacgatagccttctaggtttgcaccgtatcattatgacacttaaaacgagactttttgatttcagttgattgcaaattgcccgtctacgttcttagaagactgaggaggatgtatgagacgaagatttaaaaaacgcagctgggtgcgatggctcactcctgtaatcctagcggtttgggaggccgaggcgtgtggattgcctgacctcaggaattcgagaccagcctggacaacatggtgaaaccccatctctactaaaatgcaaaaaattctggccgggcacagtggctcacgcctgtaatcctagcactttgggaggccgaggcaggcggatcacctgagatcaggcgttcgagaccagcatgtccaacatggtgaaaacccgtctctactaaaaacacaaaaattagccaggcatggtggcatgtgcctgtaatcccaactacttgggaggctgagacacaagaatcgcttgaacccaggaggtggagattgcaatgagctgagatcgtgccactgtaccccagccgggggacagggtgacactctgtctcaaaaaaaaaaggaaaaaatgcccgtgagttcactaagggttgcctgaaacagcagaagggcccaggtttcttatttaccagaaatggaagtgatgctaaccagagttccacacgtgccttcagtatgtgcttcttggggcacccttgggcagaggggtcctcctggtgatgatgcaatgagaccacactctcggggcacgaatggcaactgcacaaagttgaggcatctgcactcacacggggacttattctgcccattcccttagcaccaaattagaaagaaaaagattgccccctgcaaaacaacttgctagattattccaaggcaggataaggcacagaaaatatgccatgtctgcctttcatcaccttaggtaggaggagagcaaactccagttcctttcttggccctttttttagacggagtctcgctctgttgcccacactgatcaccgatcactgcaacctccgcctcctaggttcaagtgatttttcccctctcagcctccctgagtagctgggattacaggtgctcgccaccacgcccagctaatttttctatttttagtagagacggggtttcaccatgttggccaggctggtcgaactcctgacctcaggtgatccacccgcctcggcctctgaacgtgctgggattacaggcgtgagccaccgcaccagcctcttagccctttttgaagttatttcttgaaggtggatgtgtacgtcaggtcagacttcctctcttaaacaacctaccctcggcttctaggaaggcagcaattgcttcattttcaagcaaacagaagagaaatacagaacattcctagggtcttttacaatcacacaaaatataaatgagcattttaaaaacttttatttctaatttttgtgggtacataataggtgtatatatggattacataagatattttgatacaggcctgcaatgcataataattacatcagggtaaatagggtatccatttatcctttgtgttataaacaatccaattatactcttttatttaaaaacatacaattaaattattctttactgtagccatcctgatgtgatagcaaatactaggtcttatttattctaatatttgtacccattaactattcccccttccctactctcccaaatgagcatatttttaaaacatttactgtttctttctgattataaaagacatgcaggttcatatcaaattcaaatacatactgaaatagaaaaagaaactctatgtcatgtataacccacctcccagggataatgactgtgaacagtgagtagtgcttccttcccgttgtttattctacacatatataatcgaacacacaactcgatttttcacgtagctggaattatatgggctgtattattccatttcctttcccttagttttaatattccatcagagcatcaggaaatgcaaggctctgaggaattctgagaatagtaataatcatagtaggagtaatgcagtcagtagtagcactctagtttgtatttattgtagtctggattccacatagggcttttctccagggagctgaaggtattttatatttccttcctaatagacctggaacaaggaaaactatgcgactaactgtcaaaagagatgagatgggcctgacacagtggctgacgcctataatcccagcactctaggaggctaaggagggaggattgcttgagcctaggagtttgagaccagcctgggcaacatggtgaaaccctgtctctataacaacaacaacaaaaattagcctggcatagtggcacacaccagtaatcccagctacttgggaggctgaggtgggaggatcgcttgagcccaagaggttgaggctgcagtggccctgatcgcagccactgcactccagtctgggcaaaagagcaagacactgtctcaaaaatatatatagagagaaaaataaatacataaagagatgagatgacttccttgtggagtcgcacacctaagtcataaccaggagcagccccgagtctgtgtccacagaggtgggcaggagtcaccttgggacatgtggccttcctctgcaacaggcaggtggcactgaatatgcacagctcctccttggaggtgggggtgctgctctccagagcctccatgcacacgctcccctgaggcctgagtcaccccgagctgggcgtgagggggccaaccatggtcccagcttcctctatccgcccctgctgcggctgtgactgccgccgcgtggacccgggctgccctgccggcccatggctcccgctgcgccccggcgggctgacagttgtaatgctgtcatccgtgtccgctcacagaaagagcaggaagcccaattgccccacacaaaggcctgaagtgctcgtgtgaaaggtcactaagtgctgtcatctgggccagggagggggccgagaaggcggcgcccactgagaacaacagaaccaggggcaggatcttcacctcggcctgtggcctggggtgtccagagagagagacaaagactcaagtgggagctgaagggacttgggagcgaggacgccggagggatgagaggcgcctgggccggttccttaggcaaccagtggcccgtgggcctccataactctgcccagaggctgacagctcccattcatcccccaggccgggcaggtggcagggcggcctgaaaggagcggggaagcaggaggacaggtcccagaagaagcccctgggacgctccaggctctgcggggaggccccatcctccagcctcctgctagggggatgggaggtcagcaggctgtttgtggaaccccaagaaacacagtttaatgatagcaaaaactactaagcatactatttagtgtcaaattagatgccgtttaatgtcacatttgagtttataaatgtggccacgactacaaagatttaagaaaacagagcttggaagtaaaactgagcaagaaaaaagccaggggggtgggggctgtttccttgccctcaacagtctcagtgagctgggggcaaagaccacagccatccatttttcattaggacacttgagtgtggcccaaaggacgccagggctctggcaggacataatttaggaactgcggaagacagagccccagcgcagttctctgctatcttgaggcatgctgtgcagtttcaaatatgggtctgaaaatcaaatagcgatcttgaggtcttgggcaatttatttaaactctcagtgccttggtttcccaccagtaaaaaaagggttcttggctgggcatggtagctcaagcctgtaatcccagcactttgggaggccgaggcgggcagatcacgaggtcaggagatcaagaccatcctggctaacacggtgaagtcccgtctctactaaaaatatgaaaaattagctgggtgtggtgacatgcacctgtagtcccagctactcaggaggctgaggcaggagaatgctggaacccgggaggcggaggttgcagtgagccgagatcatgccactgcactctagcctgggcgacagagtgagactccacctcaaaaaaaaaaaaaagaaaagaaaagaaaagaaaaaagaaaaaaaaaagcagggggttcttttgaagattaagtgttttactacccataaaaacttagaacagcaccacataaaacagtcaataagtgctaattatcatcattttcatcatcttcatcctcattatcatcaccctggctggtgaaattattggtgaatttaatttagttctttacattttttattgcctaaagcatctacaatgatcatgtattattattacaatgagaaaagatggaacttttttagagaaagaaaacagccctgatgctgccttccacaaccccggggggaagagagagcagagagatgaagtcacaaaagggaagggccactctccaaccgaaattcgccttctttgtaactagaaaaaggtggaggtgaaggttggggttttttctccccccatcttagcacacagagaaacatgacttttgcagagcatacagacctggcttcaggctgaggacggggtgactgactgtcccagttggcttggatgtgggactttgagtgcaagtcgatcactggagttgagggagcaggttttcaggcacacctgtgacccctccgggacacaccagctggagctctaaaatttttgcttttcggcccaagatttaaaccatacccacaaagctaggcaggaagcactctcagtgctctagggacgagttttaagaggactggagttggaggccagcctggtggctcacacctataataccaacactttggaaggctgaggcaggaggatcacttgaggtcaggagtttgagaccagcctggacaagatgatgagaccttctctatacaaaaaaaaacatcaaaattaggagggcatgatggtgtgcacctctagtcccaggtacttgggaggctgaggtgggaagatctcttgagcccaggaggttgaggctgcagtgagctgtgattgtgccactgcacaccagtttgggagacagagcaagatccccttctcaaaaaaaaaaaaaaaagagagagagagagagagaactggagttggaaagaaaaaggaaatgaagtcaagtctattcctggtcctttctatagaagatcaaccttgctcttaagacaaagcaacatccttggaaaccctggcaatgtactattctctgtgttgtggtttctaaaaggacgctgtcaccaaaggcacacataatggagtccccgggaagctgcactgagcacccagagccgggtggtccaaagaaatgccttttcagcacctctgaaatgaatgacgccccatgaaggagaatggcaatgaagaggtaggagcagcttgggaatttagagcagaaatcgcaaacaaattttacagagaagcaatgtgggagcagttttgactgatccctccaggaaatctccaggagcgggcagtagctattttgttccagttgcaactgaatttgcccaaggtcacatagctaggaaaccgggagccaggagacagcagggacttcaggccacaggccacagcctctctcaaaggaagcatggcttagggttgaagaaccaccccaaaagcagggaagtggggagcaggaagggtgctgccccacaagctataggagagggtgccatggaaagggctgtgtatccgtttcctttgactgccataacaaagtaccataaatttggtagcttacacaacacaaatgtattctctcacagttctagaagcgcaaattgcagaaggcagggcctctttccctccgaaggctctaggggaggatgcttccttttctcttccagcttctggaagtggatcctggcattccttggcttgtggccacatcactccaatctctgcctccaccttcacagggctttcttctcttctccctgtgtctctcttctgtgtatatcttatgaagacaattatcactggacttagagcccaactggatgatccgggaggatctcatcttgagatgtttaacttgcttatctctgcattattttttccaaatgagggcgcattcacaggttccagaggttgagacagggacatgtctttctggaagccaccatttcacccattatagcctggggacaaggagtgttcgaaaaccaggcaccaagttgtctgggtttattcccaagaaggtacactctgctgagcatgaatctgatcgggattctgatttacaattatctgcccacccctcaactctgccagcaaccctaaaatggttcactgcttagcgagcactctcactctgtgcggtacctttcatgaccttctctgctctctgtaaaccactgccccttacctccctgtcactctcagcaaatgacctttctgctgcttagtagagaaaatagaaggcttcagagaaaaacagcctcaacggcctcattttcccatccccagcccccagtactttcctgcctctgccctagcctctcctgggtccctccatttccataagaatggaattttctcctccagcccaggtcaaatgatgccacctggttgagtcctcagccctcccatttcctgagtcacctgcaaatcatcctagctgtcttctctggcttcaacatctcctgcttttgtggaaccctcccccatcattgaaacacaggcattttcttccaccttaaaatcggaaaaaaaaataaaaaaataaaaaagcaaatgctctcccttcacctcacttccacttccagcaagcagcttccatccttcccaggcgagcttctccttgtattatctgcacttcctgcctccatttcctccctgtccacacagtcccctccacctaagtggcccacgtgcttccaagccgcaaaatccaagggtctttccagccttcatcttccccagcagaactggccattaataacccgccctgcctaactgtaatattgtatggtcttgaattctgtgactccacgttctcctggttttcttcctacttctttggctacatcttctcaggcttttgttcataagttgattctccacagggcatgtaaatattagagctcaggatccctcctttttcactctagttctttctgggcagtctccctgctggggctcaaactgcagtgtatgtgaccaccacttgcaaatgctaatctccaccttcagagatcaggtattcaacaacctagcccacacctgctggatgttttaaaggcagcttatactcaaaatatccaaaacaaagttcaagatcatttatcccacaaacctgggccctttccatcttcccctgtttctgtggaccaaactaccacccatctagccagccaggaaagtcatcgccacaatctccctctcactcccattggatcagattcaaaatgatgttgccattgcaggaaagcctcattctgtttttctttgttttgaagagtagaaatgatgctatgggtatcttgaggcttaagaaatccagtagagaatggagtctgaatttttaataaaatgtttcccatttctgtgattaggattcttttagggccattatccaacgatctatcttgatttacctggtggctggaaactccaggatttatgatatttcttggatcttgatttcacaagaaaagataattcatggaaaacccttaaatcactgtcagactcagaatgcctgccatcctttcacggtataaccaactgacttacaaccgctgtaaataaaaccacataatggttacaaaattttaaaaaggagttttggggggtgagaaaatgacaaagagatacatgaaattgaattcctaaggaagaatacaatttcaaaattgtgatttaaatagatctgaaaatgttggcgttattgtcataggtttttaaaaaaatctatctgaaaaggtgtcaccagagagaagagcaagaaaaagatatgatcaggcctgattatagatagatacagaataatgtatatgttggcttaattctaaatgggataataaaataaaatttacacttctaattttgtgtctcatgcattacacatagtaaagaaatattggtctactttttccaaataatggtaatagtccaattctgtgctaggttgttctttattgggtctattgatctcaagtggctctggcctaaagactgtgatcactctctgttctatctggatgcaagtgctgagttccttagtctgttgatcaaagaatttcaaggaggccgggcgtggtggctcaggcctgtaatcccagcactttgggaggccgaggcgggcggatcacgaggtcaggagatcgagaccatcctggctaacacggtaaaacctcgtctgtactaaaaatacaaaaaattagccgggcgtggtggcaggcgcctatagtcccagctactggagaggctgaggcaggagaatggcttgaacccgggaggcggaggttgcagtgagctgagatcgcgccactgcactccagcctgggcgacagagcgagactccgtctcaaaaaaaaaaaaaaaaaaaagaatttcaaagaaaataagatttgggtgttatgccaaggttttgtgttttgttttgttttgttttgttttacaagcattggtgtctctcttggaattttttcaggattattttctctctacaacacagaaatagccaacatgcaagtatcaaccccaaatggcaatctagagttccatcacctcaagattctttctttttaaaagggaagtggtatggagtaggaagtttgggataattgttttcaaatttcattttcaccccttactagccatgtgttgggcaagttactgaatctctctgaattttcagttttgtgtctgtaaaatggtaataatcaacctatattataggtatattgttaggattacagggcatcatatacaaaaagtactcgacatagtgtcaatattcaagaaaccttagtttccttttattttactttgattatagtatttgaactttaatgattaccctttttgtaaacttttttttctctttttttttaatgagatgggtttcattctgttgcctaggctggtcttgaactcctgggctcaagagatcttcccacctcagcctcctgagggattgcaggcatacaccactgcacccagctttctgggtacagtgtacttaaacattttaagtatgttattgacactttgctaggaaatgcccatcatgaaagaatcgtgaaaacttctatcatgtgtatgaaacttttgcatgttcacggcatttcacaacagtaacactcctcttccttgaagtcccatgggttttctgtaatccctgctggctttatagttgagttcaccgaggcacaaaataacccataaagtaccattaacaacagaacagccaccatgcagcaaagcaatccagtgagccaaattcctttgccagaatatctatgcaccagccctaagcctgagccaacaaaatccaggtgaatgcaacactagatcccaaaaatggtttttggttttggcaataagagtggcgcgtcttcatagtttgaccaatatttattttggtcctactatggcccaagagctgtagcaatgagtaaagaaggcatgtttcactggatttctatgcaatcatggctgtgtaggagtaggactagaatgatgagcacataacaggaagatttgacgtggtctgggaggtctggagctgctgccatgggggggaaccattgtctaacataaatgctaaacaatgagcatgttatcagttagatgaagcgtgtatgcatcccatggtgtggctagaaccccatggagttctagaagaagctggtgagggagtccaggccacagggtgcaggacctagttaaggatgtgcctctatcccaatacctaggggcccacaatgagttgatgcatccgactacactggtcatgggaacagcaacttgctcccctcccccataaagaacattctagctagcacaaggttattttagtaaatggctgccctgcttagatgagccactagtcaaaaaattccattttattaatctgtaagtgtaagcctaaagttaaacctgcttctcagatgtttaatgtcgagtgacaccctaaatgtcatgccaggctggctgtggagagctggttcattaggataccaggagggcttctaaaactcggatgcccagacctcaacctagatcaattaaatcacactcctgggggagtgggacccggcatcaatatatttcttttcttttcttttcttttctttttgagacggagtttcgctcttgcttcccgggctggaggcagtggcacaacctcggctcactgcaaactccgcctcccgggttcaagtgattctcctgcctcagcctcccgagtagctgggattacaggcatgtgccaccacgccctgctaattttgcatttttagtagagacgggttttctccatgttggtcaggctggtctcgaactcctgacctcacgtgatccacctgcctcaccctcccaaagtgctgggattacaggcgtgagccaccgcgcccagccaggatcactatatttcttaaactccttaggtaattccagtgtgcagccaagtttgggaagctgtgaaccaagagtctcttcacctcgcgtctctccttcccccaggcaggaggaaggaatgagtagcagtgaccatccatgaaacggattcgggactttcttttagcttaagatgagagtagatagtggaagaggagcctgtccaaataccatctgcagacgaaggagcgtctacaaaacacacgagggacctagaaaccaacagacccatcccatctctctcaggttcagcaattctttccttcctcggagggcgtttctgataggacaagctgggcccgggcggattctcaccccaccaccccaactccaggcttgggtccatctgccgccagtggtgacttgggtggcgccctccgcagcagacagccgtgcgccctcggcgacccggtccctgcgctccggcgcccgcaggtcctcgctcccggcttctgcacctcccgctccgggacatctggctgagccgcgcctccctctccccgcagcctccgccggccccgcctcccctcaccacccttcccttgtttggggcggtaaggtcagaagcgttcaacaattcaacgtgggaagtctctcggaggaagtgccaggtcataaatttcacccaacaagaggctcccatcaagcttgggcttgttaggaaacctcccagtcgctaatcgagggttaggcagctccagggcgggtgggctacggggcagccagggagcaaggatgagggcctggggctgcgggtgcagagggttgttggggtccaggtgttcagtgccttgcgcgcgtggctgtcgctctgcccctctggtattgcccggctgtatcacaacccttagatgtgtccaaacggtccttgtgtgtataagacacacacccacgcacatttgggagaagggggtagtcagtgtctctttacattgcagcggtacgttaaaccccgtctgggttattttaagcctgaagttcatgaaaggaaacatttgagtaagttaaggctgtgttgaatgccgcgttccttatgaccttgccatctgaatgtgatggtggttcccagaagaaacaaacaggcaagaggttaaagacagagttctagacccagcccttgctgtgtgaccctgagtgagtcactgtatgtctctgagccccatttcccgccgcggagtgagggaattggagggtcggtgggcgtgaggcagctctaagtccccctgggctctaacggcctctggtctttgcccctcctccctctccctgcagtactaacaaggtgaaagaagggtcttatcgaattcagcctttgtcctgctgccatttgtcatgggaaatctttccagggactggcactctgacttggttggaaagccaagggtattgagcccacatcaatagaaggaaggtttgcaagccaagtctacacctgccctctgccgtgcccaacagaggggagacagtctggggattatttacccctggaacttttgctgcaataaataaagcaatgctggaggcttgaaggagtttaaagactaacaggggagataataattgttactatgcaccaggcagggttctaagtcctttgcataaattaacccacttaagcctcccaacagctccctgaggttggatactattagcccatttttacaggtgggtaaactgaggtacggggggttaaataatttgcctaagatcatactacagggaagcagtagagaggagactcgaacccctgaaaacacaaagagcagccctgggccctcggcaaagacgacgcttcctatcccggggacagagggagacaagtccaggcatcccagagagcaggaatcccagagcaaaggccaggagtgggaccacaggcagagtaaggggcccaggtggctggtgcacccgcctgaggatcggatgtctctctggggcattgtgtctacttaaagcgcttggctcaggttttccatcaggcccagaagagccattttggggcagcacagagacctcagaggaatgagctcaactgagcggctgtagtttgcaaaagctgccgaccagacaagcttcacccttcagaccaaaaagaaaaatcccctctggagcctgaattgttcggcaaaaaagataaacgtagaagccagtcccagatcttagagcacctcaatgggacatgtggatcattttctgtagttaacaaggaacccttaaaagaataagccattcttgttacggcttttgaattgtgatggcttttgcctgcaatatctgtatgtttatggcaaaatcattattttgagatgaactatctggataactgtcggagagaaactgcaggctgcatttcaccactgatgctctgttttatgcatgtgttgcatgtattcccaccagttggtggtaaacttttgcatttttcaagcctgtcagaggaccgacccactttctgtgcagtgtcagaagctcaagagagaagccagaagaaaaagacacagtagcctgtagccttcggtgcacatctgcaaagaatgcatgcctattgccactattgcattctgtccggggctctatcattcatcttctaagccaaacttctgccaagtcctctcatttgtccatcgaacatttccgtaccggctgtttttccatcttacctcgccaaagttgtttatattctccctgagtgacagagcaaacaaaagctgggcaaaagcaaacaaatagggtcttctgataattgaaccacttttgaatctttcattgacaacatctccacaccgaagaacacctgccataggtatcaagcataaatgcttcttcatcaatggttgcttgcatcgaaaagggctcagaaagataggactcctgactgttccctcagaaaacgtttgtgtttcagctcatctgggattggagagcccatttcttcctgatgtgtgtcacttggaggcctccaacctgcaaacatcaggatggctgcttccctgcaaaattaggcagctgcaggttgacttgagtctgtgtctcccgatccagaatgtgggacgatgcaattgaataagtgtgggatgctttcttcatagcataatgctacacgatgacttcctacagacacacacactgagagagaccaagggaggataaatttgggataaaaatgccacaatctcatggcctcaacaccaaactggtgctgatccaattcttcccgaaatgaaatgtgatgtttctgaattccttctggctgccgctgaaagcccccacttttcctggtgactgtgggaggctgcgatgtggtgggggtggggcacggagtactgggcgctaagctctctcctggcttcacataaaggaagcaaaatcaaaatccaagcctgaaaaaaaagaaaaaaagaaaactaaatttaattggctaggaaacaggattcctggggcctctgctttcccagcttccagagaaggatttaggctgggacacttccccgccctcaggacaaaaagaaaaaaaaaaaggattaaattcgggttgggtctggctagtacaaattgcatgcagagtatacagttgctttgcatattgcatgtgctttcatggagagggaaaacgggggaagagggagggcagggacactaaagaggggaaaaaactaaaaacaacttgctgttttcatatggtcggatagaactgttttgtctttgtaactgtgcagaatgtcaatggtaggcaccgtgtcgtgacaagattttttttttttaagttaagctaagctcacacccgagctgtagccccccgaggtactgcagctttaattgtgttcagtatgatctacagaacaatatgtcttgataaatctgaatggcaacccagcgcacggttccccttggcattgctgcaaagccaggcctcgctttagtgaacccgttcaggaatgtgggttaattcgccgaccctttttacccccacagctctgtttttgtgaggttggcagaaactgacacgttttcttttgcttaattaagttgttcagtagaaggctggtcaaacagttgcatctacgtggggagtctggagatgcacagaaagccgtgggcgtttccaacataaaaagggggattctgttattgtttgggtgtagacgggtcattttttcaaagttactgctgcctgagtgaccacaaccctgtgcgcagccctgaaaggacattaaagctgcttaaatacaactaccttcggtttactttttaaaagagagagagagagaaagagggaaagaacaagcaggagagaaacgaagcggtcccatttatgtagcattttatttctttccggactttttttttttttttaaggcaaagagtgggctcatttgcataagagatgcccatacattatgaattactgctagtatgatcaaactctctttccaatcagtaaaacaaaactggtaccatacccatagaaattgcactggccttctgaacagaggagtgggatctaatcacccttatgccagacattggggttaggaaaatgtctaaaatctccattgatgaaattcccgctttcgttccttggtgatattatgacaaccacacacagtatcagtctcatggattctcaaaggaactgagggcctgattggaggcctcctccatcacgtctctgtccctttttgaagcctcctatatttctaattcaaatcacctttatcattgatatgcagatccccccgattttctgtggatatttggtcccagcaagagtttttctcattgcacgtactgtgtgatatatttaaccggaggcaggtggaggcactggcacctgggctttgggatcctagtgctaacaatgaatggccttggtctactgtatgccctgagttgtttctattgatgccactgtgcctcagtttatccataacagcagatgctcattgtgggtacttaacaggcacctaatacatacatttctgagtttaagctgcccctttctcccttggcaataaagcaataattagaaaactcactgattccgcagcacctggcaccgtcactgtgctgataatcaacaccatgattttcagcagttatgaagcccgggtgcccattggtgaagcatcaggcttgcagggctgctcaagggatgtttgtacatacttggtcttgcagagagccattatgcctgtttggaagccaggcactccaattttcccccaggtcccagaactgcagcttttggaaagcccaaagatcagcctcttccttctagagagagaaaagactgcagggtcaaacatttcaagagacttcaccatgatttttcacttctcttaatatacaagaaacagtaggcaattatttgactgatgttagttgcatgaatggcaaaatgattctcaggccaaagaacaatccattttggagtataaatgacttggatcagcagtctacactgatatcagctgtttgtttgttttttaaagtctcactatgtcacccaggctggagtgcaacggcatgatcatggctcactgcagcctcgatctcctggactcaagccatcctcccacctcagcctccttagtagctgggactactacaggcattcaccaccacacctggctaaagttttttactttttatagagatgtggtcttgctaaatggttgcccaggttggtcttgactcctaggctcaatcgatcctcccacctcggccttccaaagtgctgggattacaggccaccatgcccagcccggtttttcattacaagcaatacctgcttactcctcagattttgccagagttgattatagatttatactcaagacaccaagctcctatatttaggttgtgtatattcaggttcccaaaaatacacaagaagttgcccagatttcaaggcgcttccaacctctaagtagagaggatggggagatttcgaagacctgttttgcacaaccattcccagatgacttattactctgaagaaccaacgcctggctgcacaaagaaatgcaaaatgcttcccccggttctggtggtcgatgtttaaggaccacacaggacaccagtctgcagtgtccctatcttacttctccctcactgatggctcgaggaagaccccagaatctgggtccggtccaccgatcttcacggtcttagagccacgatacttaggtcacctgccttactttcaaaaaggccaaactcaaaactacacacaagtctcacatacacttttaaatcgcagctgacgggctggtcttagcacctcttaaagagagaagttgtgggaagtgagagaaggcctaagcagatgggagccgagatggccgggcggcaagtggctgccggagtcgtgccacctggctgtcttcccacagtctggagggggtgtgtgtggctggcagttccattcctgcttgaggtggcgggccctctccccctttccaattccctgacagcccgggcagattttcctttggcttttgaaaatccaggacatattattcctcaaagtcgccaagttccagctgctagagagagccagcctttcgctctgttgccccaccatcgagcctacatctttacacccagggaaacagaaggccttcctccatgcgggcaagcccacaagagttcggatgctgccgctcgggtcctgcagacagaggggaggattcacaagggctggccaggagccatcccactagccctggcacttgcagctccacatggagctctgcggctcttcaggacaaagaggagtgtttttatcagcccaacgttctgctgacaaatgcataataaactgacagaaagcgaccaagcagcatttcaaaacccccagttacaggggaggccaagcctgagtggagatggtcactttctgcaggtgttcggccagtgtccctgcatttgcatgcatttgcatatactgtcaaacagttggctgacagaaagtctgaggaggtctggacacagcccaaacctgtcagtggctttctccttgccagtcaaggttggctgtggctgcaattaaggcaggaaacgaatacttctgacattgcaatatacccagccacagctgggcgaagttaaatggaaaagtgtgctttatttagaaagacaagatgcatgctggaaaaaaaaagatggggaaggccaagagtggtaaatgctcagaaagtgacactctacactcattctgcaaaaggaaacaaatatttttcagtccttccaggttgctgtgctgtggtgttatttgttgttgttgttttgttgttgtttggggtgagtgagcagatttccccactgagtgaggccaattcagcatgtgagaggagcttgccagacactacaccttttatcttcagagtatcatctcaggaagcagggaggaagctcatccccaaaccgcatttccgtgacacacgtgctaccccataaggctccactgttctgttcagtgttggcaaataggtagccatggcttggagggggtgagaaaattggagggggccgagcacaagcgtcacgttgtccccccaccaccccgcacaagggttacagctcatattagcatatggattgccatgggaaagaaacaaaatcagagccttcactactgtaagagtgaatggcctcaagagatggagggggcggggaaggaagaaagccaaagagaaaggttgttgttgttcttgctgtttttaagaacacatgagatttatatttttggaggcctgtgtccttctgagatgttgttttacagattctttaagcgagacctaacaatttattaaatacttcatctctaaacagtggtgggcactagagtttcatgagcagcaaacaatagattctgtttattcgccaacaatacagacactgtttagctccggactgcaagtggctgagccatctggctcatatctccacagtaaaacattgtccgtgacacaaaaaatgactacatccccaggacaaactagtgtgacctctaaataaagccttcctctgaagctatgatatcacactgcacaggggacaccagcacaattgaatctggtcaccaaaagcccaagtgagataggactatgtaaatggaattttataggagactttttgtcctccgtggcaaaccatccagatccgtccacagcactgaaacatctttttcattcacccctgggacaacagtgtggttctatttggcgattggcagtcctctttctcccgcgccctacccaggaagcacacgtccgtgttcccgaggcagcacctgcagcctttgcttccaacaacttttcactgatgggggccccacctgcaccagcctttttgctgatatttcagaaacaagcggccctttctcctccctgccagggagaaggcccaagtttgccagcttcttcacaaatagccaaacaagtcactctcagccttgcgccacctgaatgcccgcttcacgaggcaaacaagtatacacacacacacacagacatacacacacagacacacacacacactccagcaccctgtccaagaaaggggccatttcaatggaagaagtgtcattctccggaaaagacccaattcagtctccacgaccaaggcatttgtgtggctgtttggtgggaaaatttcattacagaaattgagacatgatgaagaacagaccaaaaagctggctcggcttaagccttccacctgttccaattcctgtttgttttgtttttcagagcgagaaaccctaacccacccctatgcataaaacattttgcacacaggatgctttataaaatacgatccctcagtgatttccccgtgcaagcaggtattggaccattttgcggccagagccacctgagatatgacacacgcagcaccttgttggagatggacaggggagggtgaattcctacgtgaactttgccagccctgtcatctcacacaaactacttaactgctcagcacccatcctcaggtgtaaaaaagggataacatttccttcttcacagaaactaaatttggaaaatagatgagaaatgcttatcataatgccttatatatagtgagggtttaataaatggaagcttttaccataatgataacagataatggtaacattgtttctatgactcctggaatttcagtgggaaaacagcttccagaataccagtcactcatttaaataaaaattgacccttgataatagtaacatttattggccgggtacagtggcttatgcctgtaatcccagcacttagggaggccgaggcgggtggaacacttgaggtcaagagttcgagaccagcctggtcaacatggtgaaaccctgtctctactaaaaatacaaaaattagccaggtttggtggcagatgcctataatcccagctactcaggagactgaggcaggagaatcgcttgaacccaggaggcggaggttgcagtgagcagacattgagccactgtactccagcctgggtgacagagtaagtctctgtctcaaaaaaaaaaaaaaaaagtaacatttttatcattattaccatttagcattcacccttgccaaattatttggcaaagttggatcagaaactgcactgctagtgggcttatcctcttcctatttctgaggtagagctttcttcatgaggcatgaaaatggccaaaattgtctattgttatttctgtagcagtcatagtcatttgtttttaaaaaatgagaatgcacagttgctgtatcttaagtataaagtcatagggatggcttgatatcttaaaatgatttctttccttttgcttcagttccaattaatcccaagattttaattgcttgcaaataatttaggagtaatctttgcacttacactggtgggtttctagaaatgaagctgtttggttgaaattatgaaagctgattttttccagttagttgagagaacacaaactggacccagagcctaggaaacaactctttataaaattgtcacaaatgccagctgggcatggtggctcacacctgtaatcccagcactttgggagaccaaggcaggcagatcacttgaggtcaggagtccgagaccagcctggccaacatggtgaaaccccatctctactaaaaatacaaaaattagccggacgtggtgatgtgtgcctataatctaagctactcgggaggctgaggcaggagactcgcttgtacccaggaggtggaggttgcagtgagccaagatcctgccactgcactccagcgtgggtgacaaaacgagattctgtcttcaaaaaaaaaaaatcacaaatgccatatttaaccaactgtaaactgagttatgggcccttggcagtccaaactttgtgataggtatgtaaatcaatttaacaggacatgacgatatggcttcagttaccatctatataactcctccagacattttcagtagaaatttaaagtattcccaggatatcaaagctagtggaaatttccatatggaaaaccttctagactttatatttttggaacaatgcaaaacactcactgtttactcacaaatctccacctctgttttgttagcttgtttcattttggttttgccttaatgcttaaatgtggaagctgttgcagatattgtattatttccatcaatcctggttaatttcagcaggaaaactgctcccagggtgacagtcaaccatgcaaacaaatgcagccctgggaatctgggacctataagaagtccagctaaggacatatgcgaatccaattaaacttagaaatacacattttggatgtgagggcaaggtcaaatcctctcatatattgttggtggcaaagcaagttaaaataacctttgtagagagtaatttgatagtctctaccaacatgtaaaatgtttacaccctctgatccaggaattctacttctgggaccatatgctactgagctattccttcaaagtgtgcaagaacatatgtacaagggggttgattatattattcccaaaaatgaaacatgataacctaagtttccatcaatagagcactgtttgaataacttacagtgcatcggttaaaaagaatgatgggagccatatgtataacatgccctataactacatctatatctgtatgtttctatataaaattgtctagaagaggctgggcacagtggctcacacctataatcacagcactttgggaggccaaagtggtcagatcattggagcccaggagttccagaccagcctgggcaacgtggtaaaaccccatctctacaaaaaatacaaaaattagccaggcacggtggagcatgcctgtagtcccagctacttgggaggctgaggtgggaggatcacctgagcccaggaggtcgaggctgcagtgaaccatgattgtgccactgcagtctagcctggacaatggagtgagaacctgtgtcaaaaaagtaaaaataaaaatagaattatctagaagaatgcatgccatgccatccagaagatgaaaagaggaggatttcgtttttatagaattccctttggtggcatttgtgttttttaaaaccaaaaagtcataatccttttggactttaaagtaccatgggtaccacaagttaaaaaatacatttcctggtcactgttcattgtcaggctgctgatattccttggcataggggacatgaactttacaagggagcaggaaagaagagctggccagcaaaacttcctggatgcccactgtgagaaggtgttgacgccaaaggctgagggagttacagccaaagagaaaaactaattccttcccttaagggacttaccatggcataagaagtctgtggctaaaataaatataatgtggaagtgctgagtgatttgacttacccgatctgtggggttttaattgtttatgatttgttggttctgcaacaatacaagccatctaatgtagtgctcaagagctgagctctggggttcgactatggccagctctacacttactggctggggaactttgccacttagtatctctgggcttcagtttccttctctgtaaaattcttggattatctacctcacagggctgatgtaaaacaacacagagcctggtgtctactgcatactaggcacaacgaatctagctattgttttgttattgttgctataataatatttatattattattatacaactaatttatttatccactgcccttcacgcagaagggacagcatggtgtagtctgtatttctgaggattcagggacccacccaggtaggctcgggttttgagttacccccgcaacaggagggtttgtgcttcagcagccacactctcggcccacaccccgatctgcattttcaacacggcagactggggtaggatctatggccatggaacaaaggcaggttcgcttgtaaatgctgaggcaggaacaggcagttatttaaacaagacggcattaaatctacaaaaaaaatccccgccatgcccagagccagctcccaggtgaccctggcccatgggatggcgtctcctgccaaggacacagggctcccctccccggggcagtttgtggcaaagctggagctggtttcagtgttgagacacccctccctcccccactgctttcaccggatagtgtttccatttctttctgggttcctcttccatcctcttggctccactcctgcaattcgcacatggccctcatgggccaccgtaccctgcaccctacatgtccttttgcagtatcacctgccttcacttgactgattctctcactcttccaattccaatccccacaagaagaatttagagggtcccactcatcttttcaagttaggaaaaccagtcaaaaattatcagcaggtggtatagacagcagccatttaagcctattatggggcggtgggtgggcaggccatgactgacacctctagcaaccaatgagattgaggaaagagactcttctgccttccaattggtcagcactgctcttaaaggccctgagctgaccagacgctgtcctcccacctcgcaggtggagagggaccctggggccagtggaatgtttggctctattttctgcgactaaaatataattgtatttgtctgtgatctagaaagtacatgactttttttcccatagctactttattatcagctgtaagtcatagcaaccatgacccaagtcatttttgtacgtttatcttgtttttattactaataccagtgctttacctacatacagtctcttacctttgacaaattctttcacacatgctaatttggataatatacgaaatgaagcgtatcttattctctcctttccatagagaaagaaatgaagctcagagaggttgagtaatttgcccaaggtcacacagctagaaaagtgagaccgggattagaacccaattttttggactcttaagtcagccctccttacatgtttttgaacgttttatggagtattcagaaaaatatttcccgaataaatgagatctcactttcccctctctctcatgttttccattttggaaatctttacagtttaagggtcaagatagtagataaagttttttaaaaaataaactttccacaagtgcagaagtaaaatttcttaataaataggaaaagattcaggacagataatatgaatacactgatgaaacaataacttataagatgggcctggcaagaagtaaaagtgtcccacataaattctcactgttgaaggaatgccccatcattacagcagagggggtcatagacacaggctttatgcctcgtgctgaatgtctaaccgcacgcagagttggtgccccatagacagagcctctcacccctccccagcctctgtgcaatgcagacggctgtgtctgtcctctctggcctctgagaagagatgagtgacccaaaaggataagctggctttggactctgtcctcctctggggtatcagaactaggtaaaaaccctcctgcatcttgaatgtggtggctctggggacactctgggcccacatccttgcttctggccacatttttatggttctgaaacttatcactgtgtggcagtttgccagagaatgaggagaacggggtcatggggtccccgccatgcccagagccagctcccaggtgaccctggccctgtgaacaaagttcacactaaaacaaggaagagctttcctgccccacctctcttctcatatttggggccagtcgggtggggagaaaacttcttaccacatgcagcctgtgtactccggtctggtgggatagcaaggtcctgctgtgcacaggtcaggccccgggtgtcctcctgccctccacccagccactgacaaatagagctttcctttgttttgccctgtgaccaaagttcttatatgccttaaaggggaaagagattttttcttatacaaaatcacccagaagccattcaaggcaaacaactcacccaagggcaatcaggaaactgctgacagaggccagccaaccagaaccagggtccctgggcactgggtgcagagcccagtaccctgaggaagctgccatcaaaggagtgactcatcccaaatgatgtcggcattgaccaatgaaaacaaaagctgaggtagagaaactgtcagaggggccttacctttccaagcctgggtaccaacactctgagtcctcattggatcttcttttgaagaccgacccctgcagggagaccctcgatgagtaaaaaatatataaacaaatataaacaggtcagtgagccgaccaatcacatcttacatccgatgggataaagccagtgtgtcagggctggccatgggctcaaaaatgtgtgggtaagaattaatgtggaatcatgctgggcttggtggctcaggcctgtaatcccagcactttgggaggccgaagtgggcagatcacttgaagccaggagttcaagacccccctgccctacatgggggaaaccccatctctactaaaaatacaaaaattagccaggtgtggtggtgcaggcctattaattaatcccagctacttgggaggctgaggcaggagaattgcttgaacctgggaggcagaggttgctgcagtaagctgagattgtgccactgcactccagcctaggcaacagagtgagactctgtttcaaaaaaaaaaaaaaaaaagaattaatgtggaatccacacatgttgaatcagaaaaattttgtactgccctacctccctttagcaaaggaggacaggacaatgaagaatctattggcaaagcagagaaaacaggctatatcgcttgccaagcccctggaattctgagaaggtgcttctcctgtgatagcggtcactggtacggcaagaggttgacaatccctggccaaaactccgaagggggtggcatgtttctgcagaaacgcagcagagggtcaggtaccccaaatgcaccctccttcctggtagcaagcagggtcccccgctggaagagctgcctgtttggggcaggttttctaaatattaaaatgtcagtggccgggtggagggcaggaggacacctggggcctgacctgtgcacagcaggaccttgctaccccaccagactgcagtacacaggccgcatgtggtaaggtttctccccacccaactggccccaaatatgaaaagagaggtggggcaggaaagctcttccttgttttggtggcaggcaagtgtctgtggtcaggagccatggagactcgtgccacggactgcgaagccacccagccatctggcccaagctcctgtgaccggaagagcttgttttgccctgttcccccagagccagcagcgcagaccacagggggcttgcattatgttagcaaatgaagaaatgctttaacaggaataggcaaattgtcatctattttaaagatttacttctaacatagaaacacaatgaaaatccagctatattatccacagaacaactacagggcttacaaaaaaaaccctctttcatcatgcatgtcagcgtgacctggcgtgtgagcccagtgcaagcaatggactatgtttctagagaccttatgcgcagctgcactccgggagagcacctaaagtctaggtctgaggtctgggggaagtaaggcccaggcaatccctctcctgaccctctctacgttggatctgatgtttcttccacaaactgggaagttcaggttccccagaatctggctttggataaggggaagcaggaacaactctacttttatataaagctggacatttgtccaaaattgcttccttgttgctgtgccacttggggacatgaaccaagtcagatgaggcttcattttggcatcaacaccccacatccatctcattcagccaaggtctgtctgtcctccggttcccagttcagtccctgggaagaaactgaattatcctctcttccaagtgtggcccatgcactcatccaggccacaggatccccttgaaggctcccctgctgccccacacccaccccatctggaaattaccaagtccttatggactttgctctttattcattcacaaagaatgtaagattccatttttttaagaactgaatagaaatccccggcatcaccatatcagggcgtctgttccacgccaactcagtaattgccccgtttctagtgctttttttttttctccaccaaaaccaacttaagctgattactgccatctcaaacaacctcactgggctccagatatatccatttaatatggccaagacaagcagccaactgccgttttcaaaagacgatctgacagattctattcactttcaaagtagctctccacggctggaataattatctttcatttcccccattctgacacctttcaatgatttgttgacatctgaagagttatgggcaatcttagaagaggcagctggactttccgcccccaaagatacaagcacaaaaaggattcccatacagcatctgaaataactctgttctttgcaaatggatatccaaatctgcatgttaatagggacacttttatctttaaatataacctcaaaaaaagaaggggggacagtattcatttaacttgttcaccgccaactcaagaaaatgcacctttccctcaaaaccagcgttccctcccttgacccataaaaccagaaaaaatgcagatatgctgagttttcaaacatctcatgtttgctgcagtcctcgttcgagggagaacagcaggagaaatccgagcaaatggcaagaggcctccactgtttcatctgctgccaatgaggttttaagtgagcatcactggaataatgtctattaataatttgcacttctatagccctttcttgagggtgtctctaagtgccctcccacgaacacaggcctcgcttgcaggggaagagctcgacacaggaatgaacctcctgcctttgggcacagtgcctcccagctcctgtctcagcacagaggcactttgtctttaaaactccagcaaaatggggcctgggagaggttttttttgttttttggtttttttttttttttggatatatgttttatatatatatatatatatgtatacattacgcaattacaaatataggtcccatgacacgcaggataaatatggaatgcaatatcttcagattattttctttctctattttttctgtctcctgcctccccaacacacaaaatttgaggactttcgttaactattttagtagtctatcaaaccaagtgcctggtagatttcagtatgggggagtagtgacagtggccgcaagaaaggatcagatgcagccacgatcgttgtcagagataaataaacacgaaatagtgaaggaaaatgggacaagcacgcagcagtttgcagcctggaccaatcacagtgatgcctcttgtggtggcctggagccctctgcacagtccggagaaaagactgccgtggggatcggtttctgttccgagagtacatagcagagtgaggctgctggggttgaagccgcttgtttgagttttccagctctaatcagatcgtcctccaaagagggaagtctctaaggaaccaggaacacagaccacatctgctggtcacttcttttccccctcgtagcttccagccacagtccctcaatcaacagcgccccttactggccagagggttgcaaacccagagggtactggggtgtctcagataaccgctggcaacctggaaatggacatatctgtatcatccatctccagttatagaattttgaacacactatcgagagcagctgttgcaatcccagctcaagtctcacggccatccctctgtcttgaacttggtcttggcgaagtcaggtctctctgtgggagttttatcatcaggggagctgcttctcccaagaaaccaataaccaccaatactgtgtgtgatcttagcagatccaaagcttcgagaagccttcatcaagatcagacattgcgacaggagaatcctgttccctgcaaacaggatggatttggattctaagtggttgaagtcacagagcggtcattaaaataacaaagaggcactggcctttttcaagcacctttctggacttctccaaagaaaccctgctgatgagagggcacagggttcattagcaatcatcttgggtcagctgatgacaggagtgaagccaaggctggcacgggcgacgacagagcaggcgagcagagttgacctgggttattttaggtgaggaggtgggcgcagagggagacagagaggtggagggagtttattttggttgaggcactttattttgctttcttgcttgtgaggattcatttcccctgggtaatttaaagtttgtaagaaccttggaattccttggagagaaagcaccattgcaaataaagaggccacagcactagtgatggtggagaaagtggccaatgccgtatctttagatgcttgggttttgggttgggtagagtttttcggcacgtttgggaagtggcttcttatatgcccagctctagtttgggggcttcccatgtgtttttgtgtctaacatgtattgttctcagcactgtgctgattttccatgtgttcattcatttaattctcacaacaaccaaaatgcgttaattcattcattctgaatcaacttgtttaatcaagagaatttgacaatgcccaccccctctcccttggaaaataagggttagcctagcagactgctcagggtcaggcttcttaatccctttcaatgccattgtcaatatattgaaccctattcaggaatcagcaatgactttccgtgcctgctccatcaagtctcatttcctctgccttgctcaaaaaaccttttataaccctctttataatgctcccacttcctcttcttccagctgcacctctacttctccaaacaaatgtagaatccccatggcagtgagtcgagtgtcctgggtgaggtgggagctattgttcataatccatgttgctattgcccagtaagacacattgcaccccacagaatatacccattgccttttcttcaactttgggggacataccgagtcttcactatacacagagtctgcaggtagatagagatctctcagtggcttttctaggcaacttgttcccgctaccccagtaggtatggacataacctcagctctcgactctcggggagcaccatctggtcatccatgtgaaaagaagagacaactctaccctgttataaaaacatgcctgacacttggaaataaagcaagggaggactgcccttcagtgccagcctggagcactcagggtcatcacattccccaggggatatgcctttgcttgacccattcattattgggcccagattctgatgttacatgttaacttgtagatttttacaaaataatttccctttttcttttttatttttcttatttattttattattattattattattattattattattatttttgagatggagtctcactctgtcgcccgggctggagtgcagtggtgtgatctcggctcactgcaacctctgcctcccgggttcaagagattctcctgccttagcctcctgagtagctgggactacaggcacatcccaccacgcccagctaatttttgtatttttagtagagacggggtttcaccatgttggccaggctcatctcgatctcttgacctcatgatccgcccgcctcagcctcccaaagtgctgggattacaagtgtaagccaccgtgcccggcctcccttttgatttctaaataattttaaaattttagaaatgttgcaagaataatgcaaagacctgtttttcctaattcacttgagtaataagttgctgacatgatgcccatcaccctaaaatactttaatgtgtatctcctatgattgtgaaagtcacccactttcatgatctaaatacaaccaccaaaatgaagaaattaacatcggtacatactatcatctcattctcaaatgccatccacacttctctagttgtttcaatctcactaaacttttataggcaagggacccaatccaggattgctcatcacacagagttgtcccatctctttagtctccttcaatctagaacagtttctatctctcatgaccttgacacttttgacaataataggccaattattccgtagatgttccttagtgtaggtttttcaggtgatgccttattatgagggtcagggatgtctttggcagaaacatcatcatagaagtgatgctgggttcatcttgtatctggccaagtggcacacaattttaatttaccccagtcctggtgacttacatgtaaacgaaataatgaaggtgatgttgtccatgtgcctccgctgtaaagttacttttttccccctttgtaacatacaaggatcttgtggggaggtacgtgagcctttgcaaatatcccattcctcatcagacttcactcactgtttttaatatccaccagtgtttcttcgttggatgattatgatggttgccaataaatgattttctaattccatcactttcctaatatttattagttggaattagtaatttttgtgtagagatagggtctcactatgttgcccagcctggtctcaaactcctaggctcaagcaaccctcccacctcagcctcccaaagtgttgggattcagttgtgagccactgtgccccgccatattagttagaattctgctttttccacttatacattcatctgtttgtttatatcggtaggaactcaagcgtacttattttacttatcaggtgatactctgctcctatcgttattcatttttatgcctcaattatcccagttctggccggtaggagctccttcactctggcttctgggttctccggacatgtgcctataattctttgagcccttctttacttcctggcacaagacgttctagcttcatcttgtactttccctgactcctcatccagccttggaattgaccatttctccaaggagtttgggttcctttaagtggggactttaggaaccaagatctgagcactgatgtattgtctgctcccgggtggcactgttcccaggccctcccagtgaacggaactaggctacatttatatacgagttgacactgacacttccaattccagtccaacaccaaagggcttattctaggatttttcccttccacatgtgtaactcccttcttcattgatgagaaacctggttccctcatcgaccttaacatacatgatgttcataaggtccagaaacagttaaatatatataatattattaaagccatctccagtctgtaaagtaataatcataatgttgttttctatgcattcagaatctacagacaccccgtattggttattggacctgtccttcagtgtgtatacagtgccaccctggcacccctcgcagcctgcacaggcactctcacagcccccgccacgccacatcctcctactcctactccctgggagtatcacactgccaagatgactcccctctggcatcgctcgaattcactactgggctaaaagaatgcctggattctccttcctcaccacggattgcacgaccagatgtcccagctgttatcagagctttcataaggtctggagttcagcaggaaagtccaggtgaaataggcttgtcttgccacgtatccctgtcaacgctattgttctttttgtccctctcagtttagtagctggaccagtttccatctgcacaccattgttccggtggccccctctcctggaacacactccccaccttctctgcacccttggggcacagttcagccccatgctttccacaaagcctggtctggtcccacgatccttctcaggacttctcttttgttccctgccatcgtcctctggatgctccatctaacccttgcttatatgctgtgacttactgttctctgtatcaaaggaatagtgtagcaggctctgtaactatttcacaagggcgcgaggacacgactactttacagccccttagcatccaatcagaagcttgactactttacagccccttagcatccaatcagaagcttgactacagccccttagcatccaatcagaagctcgtctcctccatactcattaaaagggctacaataagaaacaaaacaaaacaaccagaaaatgacaagtgttggtgaggatagggagaaactggaaccgctgggcaccataggtgagaatgtaaaatggtacagccgctagggaaagcagtatggccgtttctcaaataattgaaaatggaaataccatataattcaacaattccacttctgggtaaatacccaaaagaatagaaagcaaggatttgaagagatatttgcacacccatgttcagagcagcactattcacaatagccaaaaggtggcagtaacccaagtgtccatcaaaacaaaatgtaggccaggtgctgatcacctgaggtcaggagtttgagaccacctggtcaacatggtgaaacactgtctctactaaaaatacaaaaattagccaggtggggtggcttacacctgtagccccagctacttgggaggctgaggtacaagaatcgttttaaccttggaggtggaagttgcagtgagctgagacagtaccactgcactccagcctaggcaatagagtaagactccatctcaaaaaaaaaaaaaaaaaaaaaaaaggtagcatagatatacgtttaaaggaagaaaattccaacacatacaacaacatggatgaaccttgtgggcattatgcttagtgaaataagccagacacgaaaggacaaatactatatgattccacttacatcaggtatctagatgagtcgaattcctagacagaaagtagaatggtgattgccagggtttgaagggagcaggcagtggggagttactgtttaatgggtacacagtttcagttttacaagaccagaggagttttgtatggctggatggtggtgatggttgcacagcaatgtgaacgttttgtttatttgtttgtttttttttgaaaccaaatctcgctctgtcgcccaggctggagtgcagaggcacaatctcggctcactgcaacctccacctccctggttcaagcaattctcctgcctcagcatcccgagtagttgggattacaggcaagtgccaccacgcccagctaatttttgtttcagtagagatggggtttcgccctgtgggtcaggctggtctcgagatcctgacctcaggtgatccacccgcctcagcctcccaaagtgctgggattacaggcatgagccactgcgcctggctgtgaatgttcttaatgccactgaactatacacttaaaaaatggttaagatggtaaattttggctgggcgtggtggcttacgcctgtaatcccagcactttgggaggccaaggctggcggatcacaaggtcaggagatcgagaccatcctggtcaacatggtgaaaccccgtccctactaaaaatacaaaaattagctgggcatggtggtgtgcacctgtaatcccagctactcgggaccctgaggcaggagaatcacttgaactagggagtcagaggttgcagtgagctgagattgtgccactccactccagcctgggtgacagagtgagacttggtctcaaattaaaaaaataaaaaataaagaaagatggtaaatgttatgttacatgtattttgtcataatttttaaaaaatcaaaaagcttgtctgctcatctgtaaggtggggaggtgatggttgtgaaaaccagatgaagtgaaatacataaaacactacaaagtttggtgtgtagtaggtgcttaataaatgatgattatcattatggttttacaaagtggtcagtaaataacagattaactgattaatggactaagagatatattgtttctcctccaaggaaaactttcttcattgatatgacagagaatggagtgaaggggtggcttcatcggaagagtttggcaggctttttatgtagaggcgaatggggttgactgacagcacgtggcggcccattgcaagggtccctcccactgcgtccaaacttggcccattagagtcatttctctggcatcagcatcatctccagaaggcccctctgtaaaagtgcatatgttaacctagagggagaatccattagcaccctaatccccattagcaaggagtgtgtggctggattatcttgctgtcacctggcaggaagcgggatcctgtagagaaggacaccagttagcatattgtcgcgggggagaggggtgggaaaggcgagagaacagcatgtggtccagaggccatacccagatggaggctgcagtcagctccccagtcaaaggcaaagcccaagtcaaagccatgcttccctcttgcccacctgctccaatgccacccacagagagtgcgccacagctcacaggatgcaggtctggttgaatcttaacaataactttgtaagggaggtgtcattagctccattctcctggcaggaggatgaggctcaaggcagctaaaggcttttgctgaacatcaagtggtgagccaggactcaatgccagatcttcttgtttccctgttaggtgtatgtagcacaactggtatctgcagactatgctgctggaagggctagccgtcactgttatcacagcgactgctgcctgagatatgccaggtactgctgcaagaagtttacaaatataagctcacttgatcttcataacatactacctaggtacaatcattatatttatttgacagatacagagacagaggggacacagaaaggattagtaacttgccccaaaccacacagccagcaaggtgtaagtgagcacctgcagtctagatgagacaccactcaaaacgtcatttttctggcagccccgtgcagttaccacagtggtcaccccagtggtcagctaaaggccaagcccaccgtttctcactcctcagtggcacagctgcccaccaacacccggcccccagggtcactgagaacaggtccccagcctgctctgggtcttctaggtggacttttcctttgagatggggccaatccatcattgcattggttttgggggacaggggtctaatttcattgtaatcttctccattgctattcaagcaatcacaaaaatcatatttgtctcctgggaagttttattaaaacggagtattatgtccaagcacggtggctcacgcctgtaatcccagcattttgggaggccgaggcgagaggatcacgaggtcaggagattgagaccatcctggctaacacagtgaaaccccgtctctactaacaatacaaaaaattagccaggtgtggtggtgggactacaggtgtagtcccagctacttgggagactgaggcaggagatttgcttgaactcgggaggtgggggttgcagtgagctgagatagtgccactgcactccagcctgggcgacacagcgagaccctgtcttaaaaaaaaaaaaagcattatttattttgctgattttaggagcttttatctcatcaattattttattgtttacatttctcttatttcaatatgtgtatattatttataatatttacatataacgaatggttgttaaaatatttagacagtttcattttgtttgtttttccttaggaaacttgctcataacacttaaattatagaatattctccaaacttattatttgttatgtgaagttttcttctaccattcaaccacacagaaaatgataaatttttttacatgtaatgcaaatgtgtaaaaataaatttttaaaatatttaggcagtatataaaaatttcacaaatctggagacatccagacatggcttatcaccctggttttacaaaaccgtgaattcctggcacccaagttcaaggtgggcatttggctcattgtaagaagtcctgattcagcaccttagcccactgaattgctttggaatttctggaataaaacattctacttcaccctcaattctctatgcccagaaaccatcctggcagcaaggcagagggtcgattcaccaccatttattatctctgtgtgtgaggcaccacacagaatacataaatacaaactctcctctttcaaaagaatatatctgggaagatcatgcacatttagttcaaggacagtgagcaaacagaagtcaggtgactgtgaagaatgggagactggttaaaatcaggagcaggtggatggttcgtttccaagaagctgagctgggctgaagcacgcagcgtgtccgttgctgctccactgaacctccagctggatttccatgtggtggtgcaggcgaggggccgtgccgattcattatgacaaaatgacatatcaaaaaggttttgctggcctgcgaaagatgcccaacagcagatatgcattatcttataagttaagaatgctgtcttttagagggttagctgttttgtttgtttgtttgttttgagacggagtcttgctctgtcgcccaggctggagtgcagtggctgatctcggctcactgcaagctccgcctcccgagttcacgccattctcctgcctcagcctcccgagtagctgggactacagacgtccgccaccacgcccggctaatttttttgtatttttagtagagacggggtttcaccgtgttagccaggatggtctcgatcttctgaccttgtcatccacccccctcggcctcccaaagtggtgggattacaggcgtgagccaccgtgcccggccggttagctgttttttgactttgaaaatagaaaccatttctgacaacagtctgagaactatgtgattggcacatttatcgatgctgtgagtctggctgtgatttttactgtgcgcacagcccaggacttcttgcctggagacacaggtctaaacaacacaaaggccttcactgagcctaattttatctccgtctgcacctcattactctgtggtagcttgtttcgtgcaaacaattgctggtttctagcataacaaggaggcccgtggtgtctgtatcgaacatattcctcagagaatgagaaatctccaaccgggaaagaggagattcttgttaaggcctggaaataggctgaaatgtaaatgtgtgttcccttccacaacgtgcctaattgcccataaatgtcattaagtcaagaaacattttccaccaaattaactttgactcatgatgtctaattagcaggagaagctggaagataacaacttatcagtcactgtttaagaaaacatgtttaacgggtgacttttggctagcagcaatgttgaaccaggtattgtaactgtcaaaaccatgcctgagcccagcaattaagggcaatgtgttttttttttggtgccaagaattttacaactccctcatgggtgttttttaaaaattgtggtgagggccggcttcctaggaatccattgtgtacataaatgataggtttggggtggaaggaaagaaaacatcggagctcaaaactctttggcagaaaatatgggagcaatgcacttaaaagtgttgattcaatttttagcccttctcaacatgaaaggctcaaactctactttgcaattaaaagaacattcacagagaggttctactgcttacagagggctttgccacacattcatgcctcccagcaaccctattaggtagttgctattactgtctccattttactaacaggtaaactgagacccagagaggctattactttcccagactcatgtagcagccagtggtgggaatggaatttaagactagtattttaaggctgggcatagtggctcatgcatgtaatcccaacacattgggaggccgagatgggaggattgcttaaacccaggagttctggaccagcctaagcaacatagtgaaaccctgtctctacaaaagataataataataataattacccaggtgtggttgtgtgcacctgtcatcccagcttctcgggaggctgaggcgggaaatggcttgagcccagatggtagaggctgcagtgagctgtgtttgtgccactgcactccagcctggatgacacagtgagaccctgtctcaaaaaataaaattaaataaaagaaagccagcttggctgggcgtggtggctcacgcctataatcccagcactatgggaggccgaggtgggtggatcatctgaggtcaggagtttgagagcagcctgtccaatatggtgaaatcccgtctctactaaaaatacaaaaaattagccaggcatggtggtgcatgcctgtaatcccagctactcaggaggctgaggcaggagaatcccttgaacccaggaggtggaggttgcagtgagccgagattgtgccattgcactccagcctgggcaacaggagcgaaactctgtctcaaaaaaaaaaaaaaggaaaagaagaaagccagcttttgtgactctgacgttgaaaccatggctcccagtaggctaatgcctccctcttcagcaagcattgctgaaaatggggtccctgaacttacatggggagaaattacatcctcatttgcattacccactaactgaacatttgaatttgattacgaacgtagggcacaaaccaccatggtatttgcagttcctacaccttcctcaccagtccaaatcgctgacattttcaagttgtgttacaattgttggagacctcctgaaatactgtttgcactcttactttatctgctagacttgccactcaatcttgttatttaatgtgctttcaaataactgcataattctgcatcacagatctgtatctgtaaaatattttcagcattatatttccatataattggtttccttttattcatgagtattttattttatgcatttaaaaatgttattctgaggagtagttcggaggcttcaccacaccaaacggaacaggggcagggcttcggctctggagctgccacatttaacagtgaggctctgtagctgccatattatttagtagttgctggctggcagagccagaaatccacatggaaattgtgagtgcatgtgcgtttgggtgtcttgcagaagacagcaaagcaccttttaagcataagcaggacatagccctgacctcggtgggacctcgcactttgagatctgaggtgcactctgacttcttgggaggaaggggaggctgagcccagatactcctcagtctcccctactcaggctcgttcaatcaatgcactgtcctgtcccctaagttagtctacatgagagcagtgcttcctttcctaatgagaacaagcgtagaagtcaccactatacatgtaagcactggcagaaatgcaggatgtgttgccagcgctgggaagatgcacacccgcagaagaaagcaacagcagagagcgcggcaaaccacagccactgtgcggagcttcgcacccagcacgctcccagaaccacggagcatcaggcagcgccggcgttctaaccccgcgtgccctcgcatgacggcagaggcgttggtatttaggttttgtaattaattaactgcctttctctcggccttcaacctggcctctggaaagcatgtgggaaggcactgcctaaaaggaacagagaggatttggagagaggctgggaataaggagagaggcgaggagggagggaggaagaactagggttgtaacggaagctgaaaatacatacttgaaacccaggcagagtggctacggtagttagtggggtattttaatcttaggggtgggagcagttgttcacatgcacctaaattagtggcttcgatttaagcagagtcattctatagtaagcattggtcattgtcacagaaaaagagcactttgaggactcatgaggagttgactttgtggaggctcagaaaaacaggccctcctggcaggtcagagaggaacaaagagaatccccattgctctgcagcaaatgtatgtggcctgctttgccgtggagttgtgtggagccaacgtttcagccagggagggcacaagccacaagaccacacccggcccacccccgaggaggatgggaccccttgtgtcccaagagcctaggactgagtcactgaacaccaaagttgtttgaaagagaaagaaaagggtaggaaggcacttgaggttctatgcaaatgtacctccgaggccaggtgtgtggaaagaatgcccctccatggctgtgtcaagaaaaggagaggtggaggaaggggaggtttgtgaaggcagtgggcatggaagctatgaaaacggaccctggggagaggagaggttcgtgggacgtggtgatcctcagtcacgcactctgtggggcaaaagccttgcacacatgggatccatttgtctccgaggtaggttctaagcccctcacttcacagatgagaagctggggttcagagagatgaagtgactcacccaaattaactcaacaaataagcctcggagccaagcaatggagccagctctgtgtgtcactaagacacacacttttcacccagttcagggggtgtcagcctcagggaggctggcacccccccagcgaaacaaccagactgggagtactttgaggcagagattgcccccttggacacctctttactctggtgcctgctatagatttggcatatagtaggtgctcaattaatatttgttgaattattgaatttatgaattcaatgatttaagaattttgaatgaatgagtttgtgaataaaccaaatttggtttcttgaggtcatagcttaagaggcattctcagaaagtgctctataccccactccacactccagatccccaaagactttctcagaggtgttttctagttgctagaagtgggaaaaatgggaaaccttctgcagggcttggggactgacgagacccaaggaaaccaacagcatgagcagaggcctccacagaggcagaaggacagcccagagcccggagtcctggacccctgtgggggctgcttttatttatttacagaatgtattgatacttacttctttccaaaaatgactttgaaatgagtgcctgccgcagtcagaggagtacaaaataagacagggggacagaatccaccggaagttccagggcaggaggtttgcttggcaaaggtctgggttctgcatggagttctcaactcatcagagcaagtggaagctgggctcgagccaagagagaaatcagaaagggtacatcaagaaagaaagagaaaaatcactggagatgcagaaaaaggaaaggaagaggtagtcaattaagaggctggaacctggggtgggacccggcaggtggtaacctgagactcacttcctgccagaacagacaggtgcaattcagatggcctcttccaggaaaagaggtgactgcatggtggtggatatttccctacagagcaggatcttttgcagcggagtgtctgagtgcatcaccaaagtctctttcctcccatcctaaacttatcattagatacgcagtggattcataggaagcccgtgctcaccacgatttttatatttatttatttatttatttgagatggagtcttgctctgtcgcccaggctggagtgcagtggcacaatcttggctcactgcaagctccacctcctggtttcacgccattctcctgcctcagcctccggaatagctgggattacaggcgcccgccaccatgcccagcaattttttgtatttttagtagagacaaggtttcaccgtgttagcctgaatggtctcgatctcctgacctcgtgatctgcccgccttggcctcccaaagtgctgggattacaggcgtgagccacggcgctcagcccttaccacagtttctaaaaatcatctgtgagggagttgtaaaattattggcaccaaaaaagagatattgcacctaattgctgagcccaagcatggttttgacacatgagttccacaatgggaaatattactcccaaactctaggttcataaatagacctggcactggtgtcctcagaacagacaactttggatctgtcatgtccttttgttacgtttcctccccctttaatttgggggaatgcaattgaatatggcagactggtatttagattgcaagctgccgtcatatttcaattggtgtatgatctatttgggggccagtattgtgtgttctggggctcttctgttggaggctaatatggtttggctgtgcccgcacccaaatctcatctcgaagtgttgctctcataattcccgtgtgttgtgggagggacccagtgggagataattgaatcatgggggcggtttcccccatactgttctcatggtagtgaataagtctcacaagatctgttgtttttagaaggggtttcccctttcacttggctcccattttctctcttgctgccaccatgtaagaagtgcctttagccttccgctatgactgtgaggcctccccaaccatgtggaactgtgagtccactgaacctctttttctttataaattacccagtctgggtgtgtctctatccacagcatgaaaacacactaataaagaggctctatgcataatggttaagagcttgagctgagggtcagatggtcccggtttccaaacatcagagtgtccatctataaaatggcattcatacagaggtgatgcacatagatcacctcacatgcctagcacagtcagtgctcagtaaatgtcactactgatgttatgcctcatcttcagagcctctggacttacaggagtgggaagtgtagtattgcttagagggtaggcgtcccctttgcattgcactttccacaagagtggtggttaggaggtcactgatctctttgagacgctaatgaaaactacaaaccttcttcccagaatagcacatacatgtatgtgtgagtgcacactcatgcacatgtttttgccttcaagctcagggagttcataggacgccaccccagagcctacccttgcacccctgtctgggcaccaagttgtgattagcccatttgggagctgagatacagctatccagtttgtccaggagatgctacatcaagccaaatgacagctgcaaagacccaacccaggcccccatcagacaccctccctcagtctgggtggaaaggactttgtacatcgagttcatcagggaggtaaaagataaaagtgtctgtatgtgacttggagtctttatttcattctactcatatttggggagaaggaattgtcaatagtatctgacacaataaagtgaaagttaaatcattttgtcaacaatctccagataaacgtactccagcaaaattaacgaaggtcctgattaaccatgccctttaatttgggacgggggtaaaatacaaatatatgagtgattggtgctcatacaaggaagaggggccttactgtttaaacacattagggccatattgatgccactgtagagctatgactatgtaaagtaccagcgtggctaggcattgcgacctgtacctgcaatcccagctacatgggaggctgacgcaggaggattgcttcaggccaggagttcaaggccagcctgggcaacatagcaagaccctatttctaaaacaattaaaaatgaataagttataataataattttaacaatcattaaataaataaggtaccagtgtgataacaatgacatctcgcttagatagtgccagttctgtaatcctgtgatcctctttgcccaaggtcacacagccccccaaccagtgaactcaactggagagcgttatccaatatgacttatgggatgcacaaaagtgtgacttggagataaactagttgaaattctctcctcttgtaatctttattttcttggagaaatagtgaagaaattaatgttataaaagctctgcaaaagtgaactgaccacctaattagtccaggtgaatatttaaaccactgtggaaaagttgatttttccatttgctattgctgtgtaatgaaccaaaacctcagtggcataaaacactagtcatttatcatcacccacgtatttgcatgtttacagggctggcttggtcttggctgatctggacttggcgcctctgatcctggtgtctctcatcctcctggacccactggctgactggatatgttcctatcatggcattggcagaagcacaagggagagagcccgaccccacaagtactttccaaggtccttgactgagttgggtccactaatagcccgttagccaaagccacaaagtcacccaaattccataggcgcacccaaagccgaatggcagggcagctatgggggaggggaaaggggcaaatatttctgaacggtcatctaatcttcccagcgtgagagagagagagggaaagcttaagagaaataagatgttttgcagtggttctcaactttgcatattaaagctacctagagatgttttttaaatacctatgcatgggtccaacctcaaagattctgagctagggtgtggtcctgacatggaagtcaagtatgaaaaccactctaaagatttcccagagcccttcctcaagagcagtcatctcacccctaactgcgcatcagaatcacctcgggagcttttacaaactacacatgctggagacctgccccagaccagcatgttattttttttttaagcattccggctgggtatggtggctcacacctgtaatcccagcactttgggaggccaaggtgggcagatcacttgaggcagatcactccagcctggccaacatggcaaaattctgtctctactaaaaatacaaaaatcaaccaggcatggtggtgcacgcctgtaatcccagctgctcgggaagctgagacaggagaatcgcttgcacccaggaggcagaggttgcagtgagctgagaccgcaccactgcactccagcctgggccgcagagggagactctgtctcaaaaaaaaaaaaaaaaaaaaaaaaaaaaaaaggatccctgactattctaacattcaggcaggcttgagaacaatggttacttgagagccataacaccccagttcagttcttttattcatgacacaaagattattcaaggcctacggctatatgtgctagggcttggtgacaccccggtgagcccaaatggacacagactcttctctcccagagcttagtgcaggaaacagtcaattaaattattacattaacgaatgaggaagaggctctggtggaaaagaacatgagtctgtgacagcaacagcaaaccctggggaagtcatacaaggcttccttgaggaggtgttctgggcccgggcctggctgtaaacgcaaggagcccctagagttaaatagaaagtaggagcagggtcagcatcgcctccaccacatctcagtgctgttccagtgaacaaagacataccttgcaggaagatttttggggggtggggtctaggtgcctcagcagacaccaaatgggctggaggagacaaagctgacaggcagatccactgatcgccacatggtaggagggagatagaactctcctcgcctcttctcccctccccaggggcagctgccatcagtggatgcgttgaaaggaccaagcccccatctggaagggctggaggggagagggattgggaacggtgaagttgcaaggaaggagatctgggtgatagaaagttctggaattgtaggtgtttgctgctaagaggtgtctcagtttggtgggcagttcagctcctaaactccatgagctttggagttctggaggtttgcaggactgggggcggtggtacagtggagcaggtttgcccaggtgccaaatgtacacatctcaactctgcttagtgacattctgtcaggggctcaaaatcagccacggtgggagtatttacaccatggaaatcagtaaaagccaaaaatcagggctctcttttatctccacctcaggagagcctgttgttagacttttatatcacaccactggctggaaggaacttttagcttggaaatccttaattgatgagctccaggccaatcaagtgagggttcagaagcaaaggaagggagctgacatagaactgaagctgcaggaaggaaggcaaagctacagagagtgagcatttggctggaaattcctgtcgggtctatctccagaacccaggaggggaggacatatggacataagaggctgaggccgtttatgtgcaatgagttcttaagcaggtcacttttctagcccacagggcttgttttattgcaggaccaggcaattttttgagttcccttctaatgctaacacgtataagtttaactatgtatatctgtacatagaaatttaactagcaatatggaaggaaacccacaagccacaccactggtcctgtccacaagcatgggtaacataaaatgaggtggatttattcattcgtcaattcatttgtcaaattcgaattatttttgagacttgctgtgatacagcatctctcttcctaagcattgtgtatgatattaagaaaatttgccaaagctcactccctacccaccatccctacctctcctctctcctgcacggtacctccaacatctggattgcacaccagagggtatgggaaagcagaacaaaaccagatgagaaatctggaagtcaggtgtagcagatgctgtcaatgtcccatcaatatcccctgctctgcaaaaagcccttcaagatgcttctttcgctgaggtctttttctggccttgaggccacatttggcctgcgtgcacagtgaaccatggaggtggtacagtgttcacgcccctggaagcagcttcaggcagtgacgatgggaactgaggagcccagccctggttgttcttcactgtcccccagagtccccagagagctgagctcatttcccacagcagtaactagcttgataacccattttttactggctctctccccttccccactcccctaccaatgtttcctgctatcagctcccaaataaataatttgcattagaatctttgtctcagagtgggcttctggaggaatccaaatgaaaacagcgggagtctaacagtgggctgggaagcttcagaaaactgctggacttctctgaaacttgctttcctcttccataaagtgggttcccataagactgtctgtcccttacccctctcacagagaggaggcaaggtggcatgaggcaagaggtgcgacagggcctgggagaagccacagcacccacggtggggacatcttatgctggtttggaagatgttagatgtctcagagaaagacagactttattccccggagagcttctgagagggtaaagacatatttgacctaaagtggttttggaactggatcttaccccaaaatagagagaatgagagaaaggcaggaaggcagacaagaaggaacggagggagggaggaaagaaagaaagaaaatagaaaaatgaaatttgtatgattttctcattttacaacccaacagagtcactggcatttggggactgtccttaaaagatttggagaatgaaggctgggcacagtggctcatgcactaatcccagcactatgaaaggccgagacgggcagatcacctgaggccaggagttcaagatcagcctggccaacatggtgaaaccccatctctactaaaaatataaaaattagccaggtgtagtggcaggagcctgtaatcccagttactcaggaggctgaggcaggagaatggcttgaacccgggaggcagaggttgcagtgagccaagatcacaccactgcactccagcataggtgacagagcaagactctttcagaaaaaaaaaaaaaaaggtttggagaatgtgtaacgacatgatcctcaagaaaattaaaataacttatgctgaaaaattgaaatagagtctttaattttccaagtcacagagctacaaacatgtacagataaaactgacaggatatataaatgttagcaaacttccccctttaaaaaagagaattctctttgtcaacatttgttctcatatcaacaaattagggaaaggacctaaacgttcaattaaatactctttggatcagaaaaccacggagagaaacgtgtggcagtcccaagtgtgttcctggtttacctcattgtttctgagctctgcagcctgacacatacggtgcgtaatattatccaaacagcatcacacgcatgtgcccaaagggacagccacatccccagtcccggctctgtgccttatttttaaagctttggggctttttcaacattatttttgcgctgtaagggaagaatgaaggggcagggggatgggaaaagaattgaaaataaccagtttcaaacatgcccctaactcacacgccaaaatatggctttctaatgagaggactgcacagcacaaagctgtggccccaggaaagtgcagacgttatgggtacccccgttcataccgcagcagaacgatgagtgcacagctggtgagacaccccacttgcctcaacttctagaaaaactggagcgattcaggctgggtgtggtggctcaggcctataatcccagcactttgggaggccaaggcgggcggatcacccgaggtcaggagtttgagaccaggctggccaacatggcaaaaccctgtctctactaaaaataaaaattacaaagattggcctggcaaggtggtgtgcacctgtagtcccatctattcaggaggctgaggcaggagaatcgcttgaacccaggaggcggaggttgcagtgagcggagattgcaccactgcactccagcctgggtgagggattgaggctccatctcaaaaaaaaaaaaaaagaaagaaagaaagaaaaaaaaaaagaaaaactggagagattcacactccagggcaatggatctttcttctataagtccaaaacttttccagcaagttgtttaggacggaaggattagagggaacaagaagcagggaatgcacccgtcgacaccaccctgctaacactttatgcgttttttaaagttattttcttttttaattcttaaaagttcacactgagccagacaagtttcaatcccatataaattcagatgatgaatccacacaaagctccggaagatttgcaatggaaatggccaccggcccttaactacagagcccaatgcgacacttgcagcgtgtctgatttggaattcaaattccactcaagacaatggtcctttattaagtttctgacattcataccttgcctgctggctgggccatttctcactgaccacttatcctgggaggcattctaactcttcacccaaacacgttaagaaggtgaactgaccaaagggaaccacccaaagagataaaatgctgtgcaaaactgagtctgacaaagcccctgctctctgcctcacgccatcctttgctggccacacccatttgcctttccgagccatgaaaccgaaagggttgtctctgtggctgagccaggtacctgttgaccaccctttccccctctccagttcatatcctctgctgctgtcagtgacacatgcttcctggctcatctgggtggcccagcctcattaggaagggatttggtgcctgttagttaattgaggcccgttcctgccacctgccactcgcaggcctcatctgcacactaactgcttctaattgtcatcatacggcaggatccccgcaacaacttgagaacagatcccgagcagcccgtgcaggctccacgacggtccagggagctgaggctcagggagcatcgggcactgtgacgatttagcaaggggccagatgtttggaaaagaaaggcactttgcatcaacatcagtgtgaaagtttctcatttattatactccccggtgccactttatagctaggatgaataaaaggcttcatctgtacagaaaccaactcaatggagaacaaatggctcagcgtcgcagactgcacatcacgcagaaatggtgcggcttatccacgcacaactggagccggcgcattggcttaacttctcctattgagaagtcggaatgtgtttaggatatcagagcgtacccccacaccctgttttgaaagagtttgagtagaaaaaggtgcagaggtgagtgccaaaagctgatcagccccttgaggttggagaggggagtcggggaggagacacaggatgacacagaaggagaaagtcaaacacactcagagacctgaagggaaaagagacggagggaaaatgtaccatccagtggaagagtcggaaggggctttggcgtaggtacagaatacatatctgagggaaatggaaatacattcaagacacaagctgtgaggactaaggagagagacagtgagaaaggggaaaggagagtctgtcattataggaagtcacaggatttaggggctcaggaaccacatctggagggaatcaatctggacttaatagaaattaggttacagcaagtaatacaattagtttggttttagttttgggttttttgtttgtttgttttttgagaaggagtctcactctgtcgcccaggctggagtgcagtggcatgatctgggttcacggcaagctccacctcccgggttcatgccactctcctgcctcagcctcccgagtagctcggactacaggtgcccaccaccacatccggctaattttttgtatttttagtagagacacggtttcactgtgttagccaggatggtctcgatctcctgacctcatgatctgcccacctcggcctcccaaactgctgggattacaggcatgagccaccatgccgggcctagttttggtttttaaactacaatcataaccccagcccacctccccgggagtcgaagccccagggtctcgggatgccccatcactggggtatttgtccggtctcttcccctaaaactgggaagtattttttgcctagagatttctaagtcatgtctgcttatgagtcctttcctgctggatgaaggaatggaaagaaataaggaaaacctgggatgaacctaggagggacgtggcaccagagaaaaagaaacaagaatgagaaacgcaacacccaaaaggctcaagtgtggaattaagggtgagacatatggcttcgtcgccacagatttagccaatggataaaaatatgccccgagacaggttgcagcaatgtctcctcactcccccatctctaagattccagaaagaaaccaaaacaaatggaaagtcaaagcctgccctggaaggctcgtttatttgtctgtttgatttttagagacaggatctcgctctgttgcccaggctggagtgcaatgatgcaatcatagatcactgcagcctcaacctcctgggctcaagtgatcctcttgcctcagcctcctgagtagttgagaccacaggcacaccaccatgcccagctaatcttttcattttttgtagaaacaaagtctcactatgttgcccaggctggtcttgaacccctgacctcaagagatcctcttgccttggcctcccaaagtgctgggattacatgtgtaagccatgatacccagcctacactacagtgcccagccatgtgtgggtgttttgttgttttgtggggttttgttttctgttttttgagatggagtttcactcttgttgcccaggctggagagcaatggtccatctcggctcactgcaacctccacctcccaggttcaagggattctcctgcctcagcctcccaagtagctgggattacaggcatgcgccaccacgccctgctaattttgtatttttagtagagatgaggtttcaccatgttggtcaggctggtttcaaactcctgacctcaagtgatctgcccgcctctgcctcccaaagtgctgggattacaggcgtgagccactgcacccggccgtgtgggttttttaataaaccaagttctgaaattaatgccatcctttctaacagagagagaaggaaggaaaggagggagggagggagggagggaggaaggaaggaagggagggagggagggagggagggagggagggatataccctgaaatggaaaaggcagggtgttgtgaattgcttccagaagaggtttcagaactgttacccacccgagtcaccagcttcagaaaagggcccgttcctccagacttccccaaagacaaccatcgaggagagggtagtcgtgttgattaaaccccagagagccaagagagcaaagccacattttgccggaacacagcacctcttacaaagacacctccattcttttggtttcctccacaaatatatcaagtgatttttgaggaactagctgccactggctttcttcctaagttttgacgaagaacaatttatgtcttcccagagctcacgcttccgcctcatgcgcaaagccttaaaatgtccttctgcataatttgctaaccccagcacctgtgcctcatctcagcttaattctgcccacgatgcaaaacccaaagagcccttcttttcacatcttgcctgcctgctactggctttcgggctccccctcctcagcgtccctccctggacgtcactcactcactgcctttccccccgctcgcctcctccagcctgggaacccgaggggcctaagtctaggctgcttccgagagctggcagatttcagaggaaaaaaaaacacacgagaaagaaagaatggcagtttgacactgcactgtcacagttaaaatgggccctgcgcgtgacccaggcttggacaccgaggcctcgtgcccaatcacagctgaggctgcatctgccacggttcacggacccgccgctccatgctgggggaccagatgcctctgtttacgccgctctcctcccagccttctgccggccggtcggcagcaagacagagcccgggagcccgtcactgggcttcagctgtctccccagtcttgtctttcaatatattctctcctctacccctttttgtctccacacccccttccccaaatggccagaaggggtatccctctttttcaagtttgacccaatagaacaaagcggagaaagactaaccagggcgactttgattcctgccatcctcgaaacaacacagtgttcaaagatcaggccggcccggcgcggtggctcaagcctgtaagcccagcattttgggaggccaaggtgggcggatcacttgaggtccggagttacagactagcctggccaacatgatgaaacccggtctctactaaaagtataaaaatcagccaggcgtggtggtgcgctcctgtaacctcagctactcgggaggctgaggcaagagaatcacttaaacccagaagacagaggttgcagtgagccgagatcatgccactgcactccagcctgggtgacagagcgagattcaatctcaaaaaaaaaaaaaaaatcaggccagcacatcaccatcaccccattctgtttctccaccatcttcctgctttaaatgtgtctgtgagtgctgggaatatggacattggaaaaccaagttgagatgccagcatttaaccttttcagttttataaaattgacccattttgctggaagttgagggctgggagaaggagtgacaggtttaaagccagcagttcactgccatctcttaaaggccctcaaaatggatttggggtttatctcttaagagacatctggggcacgattgccactctcttttctttcactgaccctgcagctcaggacttgcgcagaaggtatgtgtgggcatccctcccagacaaggggagtagagcacacagaagaaagtgtgttagtccccagaggccaagtgaattcatgtctgggtgcagagcagaccaagggccaagggttgccccatacacagtctcccctgcagcaccgaggagcatcttcaaagcagacccagctgcccgttctctggctcccaaagcaccacacctttggccagagaagggaagaagggaagtttccaccgacaggctctctcattgccaaaggtgatggctgtccttcacatgccagtggccatccttgctgaggactcacgccctcatcacgggtactgagcactgcctctccatcactgtgcttgttcttggaagcatctgggattcgcttcctctcctcacctttccctcccccaaagctccccgcatcacacccccagctcctgccactggacacttctctttccaaaattgagcttcagaatgaactttggcctagaaattatatgacccaccgtaacaggttctacaggctatgctaaattctttctgggctggcctggaattcaaacaaacatgtggggctgggtcttaggggtatatgctggtaaatgaatcgggggcccctgccctcaagaagttcacagctacaccagcaagattgtcaccaattcatcaaaatacaatgtggcaagtggtacacattgagaattaccatggggatgccaggtgcagtggctcacacctataatcccagcactttaggaggctgaggcaggaagatcacttgaggccagagattcgagcctgcagtgagctatgattgtgccactgcactccagcctgggcaacaaagtgagaccatatctctacaaattatattaaaaataatttttgaccaggcacagtggcttatgcctataatcccagcactttgggaggccaaggtgggtggatcacttgaggtcaggagttcgagaccagcctggccaacatgatgaaaccccatctctattaaaaatgcaaaaattagccgtgcgtggtggtgggcacctgtaatcccagctactcaggaggctcaggcaggagaatcacttgaacccaggaggcggaggctgcagtgagttgaaatctcaccactgcactccagcctgggtgacagggtaagactctatgtcaaaaaaaaatttttaacaaaataaaaataatttttttataaaagaaacaaaatgctgggcaaggtggctcttctagcacttcaggaggctgagacaggaggatcacttgaggccaggagttcaagaccagcctggtcaacatactgagatcccccatctctacaaaaaattcaaaaattttggtgcacctgtagtcccagcttctcaggaggctgaggtgagaggattgcttgagcccaggattctgaggttgcagtgagctatgattatgccactgcactccagcctgggtaagagaataagactccattggaagggagggagggagggagggagggagggagggagggaggaaggaaggaaggaaggaaggaaagaaggggaagaaaagaaagaaaaagaaagaaagagggagggagggaaagaaggaaggaaggaagggagagagatagagggaaggagggaaagagagagaaagagagagaaagaagaaagaaggaaagaaaggaagagaaagaaaaagaaaaagaaagaaagagaaaaaagaaagaaagaaagagaaagaaaggagggagggtgggagggaaggaaggaaagaaggaaggaaggaagggaaggaaaagatgctgagaaaagggcaaataaattccgcctgggctcagtgagggaaagtttcatagaagggtgacatttgagctgaatcttgaagagtttaaaaaaaaaacacacacacatgaggtgaaggcatggaagaaaacatgtagaaagaaggaaaacccatcattctttccactactgagcacacagcataagccagacgtggtagtaggtgctggagactctgacatacgcaggaaactatgggcgtgatggtattttattgaggaatatgctgtgaatgccatgtggcaatttagcaaatgaggctctgaaaagcagctcgtttataacttggcagttactgacatgtgaatgtcaaatacagacatgcactttgccacatttagtccttcagggttcgctgggaccagcatgcattccacaggaaacaaaaaaagagatccagagggaaaacgtgttgctaatccaagtatttgaataatatttatcatgcgtggagtacatgcaaagcacctactgaatgctctttgtgagttaaagaggttggcagatttgagtttatgcaaaccaatataatatgacaacatgatatcattatgtctattatatttatagaattatattaactttatgttatgtagttttgcaaacaaggtcctgtctataataatagcaattttattttatttatttatttattttttagacagagtcttactccatcacccgggctggagtatagttggtgccgtctcggctcactgcaaactccacctcccagattcaagcgaccctccagcctcagcctccttagtaactgggattacagacatgcaccaccacatccagctaattgataacagtaattttatttatttatttatttgacagagtctcgctctgtcacccagtctggagtacagtggcatgatcactacaacttctgcctcctgggttcaagcaattcttctgcctcagcctcccaaggagctgggattataggtgcgcaccaccacacccagctaatttttgtatttttagtagagacagggtcttgccatgttggccaggctggtcttgaactcctgatgtcgggtgatccaccgaccttggcctcctacaatgttgggattacaggtgtgagccaccatccccggctgataatagtaattttaaatactcaacacaaatattatttttaacccctgcatcttccttcagatctgagaagtttcttgaagaccatcagcatcttcagtgggcgactggaagatacactgtggttacctgggaggcagcccagcctggaccagcaacccaacctgcttcttcagagcaaaacaagaactaggaatcatcttttcacctgggaaggaatcaagtaaaaagcaaaattgaactaaaggcaagggtgacataatttgtattacatataaatgaccagaaaccactggtggccacaaagttttactttgagctaataaaacatatgcatgcatctagtgtaaatctaagagtctaaggatgttacaagcctgttaaagaccctattaactccattcttcctagatttccagtatattcttcttctgagatgtcactttgcaaatttagttttaacctaaaatgttttagcaaaaaatggtgaacatattttggcaagatgtcattcatatagtttaaaatagtgctttctaggtatgaaatgacatctgtgagagccccaccactcacaaaccctaacacacactttcccttttgaaaataatttcgtatctgagtcacagctccctgcacatgcttaacttaaagtgactccaaaatacgccataaatattaactaattaatccccatgacaacacagggaagccctgaaaaactctggagagtgcccatggcctgggcagcagtgccacagcttgatttttaagaatcttgttctttctaggctttctctgatcaggacatcccttattgccttcaaaaaacaagacaaaacaatgacaactcaagaatgtggcagtggtgactgctgctgctgcttcccttccctcctcctcctccctctttctcctcctcctccctctttctcctcctcctccctctttctcctcctccttccttcctctctcttctctctctctctctctcctccgccccaccccaccaaaagcagagctgtttatccttggtgttgactatcagaccccgagcttgtaattcagcaccaaggacacctctcatgcttttggaaactgctagacagtctaccctgttataaattaaagctttggtttaaagatcaccacgaaaaccagcccaccaagaaaagtattccctgcctcaaccataattgcagtgatgactttcaggcaaaaaagtatatctatatctaattatctatatgtattgtaattatattaattaatattttaatttattttaattaattcataaatcttaaatataatccatactaagcaaatgcctgctgaatgtttgtatttatagtataaaataaaaggctcaaatgtccaggtgtttgggacctcagggagtggctgagaccacatggtcttcatttcacagatgatggagccaagctccattgagacgatggcatctgcctggattccaggaactggggactattttctaccgaccactccttccattatgtctttcactaatattaggaaatcagccttatgctacaagtgtttttatttccctcctgagaagctttcccctgttgataatttttttcgaaagcaggtttttgaaagaacatctccttagggatttattataagttagcaacttatgaaacttttgtatccccttcacccagcccccacttgttgtttatgcccattttgctttagaagataataggtcttttagctaacgagcctcttgttaaaaaaggtaacataagttagaaaaggtaaggtcaagggcagacctgggaatagaaagagtgagaccaagagaaacaaatggctctgcataataataattaaaaagtaggcgctttcagttttctttgggttggcacaaaagatgggcattacattgagagtaataacctgagaattttggaggtggacaggaacttcataggaagagtaaaatcccggaacccaggagcaggctggggccaagggcagtgatggctggtaaaggatgccccatgatgagtttaagagatcattttctcaaagtggccacagcaatatctccatgcctacaagctcttcccaaaaggtgtcactttccatcaataggtggagagtagggatcaaccccttgaacttgggcaggactttttactgccttgacaagcagaatgcacagtggaagtgatgctacatgatttctgaggctaggtaaacaaaagcaatacagtttctgcctgactcactctctctcaggttgtttacctttcaaacttggtggccatgttgtgaggaagcccaagtgacatgaggagttcccgtggaggtgtgctgctgacagccccaggtgagagctcagccaagaatcagcacaacactgtgagtgcaaacatgtgagtgagtgagcttgcagaggatgtgatcccacctaggatgtcagcattcaagacaccctagctgacactgagtgagtataggtgaagaacatttacaacagtgataatagaaaacttgtcataagtttttaatttgtgctgtaattacactctgatattcccaaatcttcaataaaaatccattgtacagtaaaacttcattagccttatgttggaaatggttaagaaatgaaggaaagggactgtgtccatgttggggcagagcagtaggaaaagggtggcaggcagtgtagcaatgaggaaaccctcagatgtgatggagggaaaagctaggggctagggtggggaaagaggtgacaggcattaaccagtggaatgcaagctcaccccactcccacaccttcacacacacaccagaaattttcagaagcaatgagaaggagactggatttcttttgaaaacaagtttttaaactactggcttgggatgcaatattgccaaggtttctgctaaaaggtagccatattacttgaaaacagaagcacaaaacaaccactgaatacactggattaagtgaacgtactagaaaaccactacctggtaggaagaatggctctggtgtggaggagttactacaagcaggtaaataaatttttaaggaaaaaggggaatttacaaattaaaatcagatttggttcccagtaagaaacccaaaataaatcacttacaaaagatatgtttatttccatcatgtgggactctgaattcagacattccagtaggggaatggcttctctatcatcccctaggatctatgctatttccagttttcaattatgccatttctggagtatagccttcatcctcatggtccaaaatggagctccaatcatgtgtacacattgcaagcagcaggtgggaggaaggaggaaaatgcatgagggatctcagccagtaacctcttagagaaggtccttaggagctataattcttgcttacaagagttggacctgaccaatgggccaacaattagtcacatgaccacacctaacagcaaaacaggctggaaaatgtagtcttacttccaggaagtcacacacctgccaagagtcaggagttctaaggggtgaagaaaggctttttaagcgaggcaaccaaccacctctgtccaggtggccaggaagattaaatgtccaggtggtgttacatacagctcaacccttatcctacaaagcatagtttctcacccaccacagccaagcgaaagtcatcaagtgtctcctgttgtttcccacgttctaaaattggaggaaagttattgcacaagtgcctaagtagtgcagctgatccatctggaaaggctgttcttaaaccttggcttaaaacacctccaaattccttaaacagcatagcaaaatcaagaacatattttcaaaagacaatttaatcaatatctcttacattgaaacacacacacacatatatacacgcgccttttataaatacatattttatagcacttttagaaatgggggaaatgtcacgaaacaaaacatcaagaagtgagggtcacaactccatgatggcaagaaccactgcttcaggagaaaacaaaatctgttttggttactcacttaaataccaaaagtctgaccaaatcgaactgcatttgaaatttctggtggccgtttgccttggatttttgtaaattttgattcactcaccagtcctattttgcctgtagcatagaagaaaatgtaataaagcaagaagaaggtctttgaagagccatacttgctaaaaccatgtgtgtgaaaaagtggcagaaccaggagtaaccaaaaggcaccactcagtggccagggttgctttagtggccttgctcgtatagtaagatcaatatttccacatggccgcgactcacagggttcccatgatggtggtggtggtcatggaggcgactctctcattgcttcaaataccctgacatctgcaaagtgcttttgccactttgaggattttttttaaatctaatatagtttcatcaaaatcacgaaatttttgatttgcttccatttctatgaaggtcacatagacccatctaacattaggtggaactcaccaagatggtgttactgttgccgaacatggtcttcataatgtggctacaattcctggcccccaccccccggaaaggttaacaagaaattgacaaaatataagaagcctggactttaaagagtttaactacacaataccagaacagtcataaaaacagatcatcaaatgctgactcaaaggcctcccagagttgaatgagatgaataaaaatacagatgaacttgttgataccatcccacacttagaaaccctgagaaaaatgtctaagttttggggggcttcagagttaatcattttggaaactaggcatttttgcatgtatgctgtattccttgaaggcaacttaaccaattaatatagtttggatctgtgtccctgcccaaatctcatgttgaaatgtaatctccagtgttagaggtggggcctggtgggtggtatttgggtcatgggagtggatccttcatgaatggcttgggccatacccttggtgataagtgagctctctctccaagtccacaggagatacagttgtttaaaagtctgtggcaccttcccccatgtccccctgctctctgctctcttttttttttttttgaaacagggtctcactctgtcacccaggctggagtgcagtggtgcaatctcggctcactgcaacctccacctcccgcgttcaaggcgcgattctcatgcctcagcctctcaagtacctggaattacatgcctggctaattggtgtaattttagtagagatggggtttttgtcatgctggccaggcttgtctcgaacttctggcctcaagcaatctgccctcatcagcctgggattacaggcaagtgctgggattacaggcgagtgccaccgcgccctgctgatctctgtctctctgtctctctctctctctctctctctctgtctctctctctctcctgctcccaccatgtgagatgcctgctccccttttgccttcctccatgaataaaagctccctgaggcctcgccagaagcggatgctggccttacgcttcctgtacagcccgcagcaccatgagccaattaagcctcttttctttataaattatccagtctcaggtatttctttatagcaatgcaagaacagcctaatacacaccaaccatggcaggttcaatgacaattgagaagacacatctcccaaatagattaactgcaagacactcaaaaatagggtccatattttgcatgtatttccattcatttaaatctgggttattaaaataaaaggataggataaaatactttgaaagaattaaaatgatttcacccagttagcttttcctctgtgagttcagaattgaaataagactccattcccattattacttgcagcccataggcacacatttgtagtaactccagctcattccaacagaattggaaggaactgctgtgaattttacagaagtcgttgctctgtgacaaagttcacggctccctgcaccccctgcctccgaatcccaccagaagccatcattcctgattaaagcaagcactgtcaatttggccgcggcccgggccattccaatcccctctgaaaacattgccaaaacagatttctgactgggtcacgttaggtcacaatatccacgggtggacaaaatgtagtaaaaattttatgggccacttgagacatagtggatcggcacggaacaagccctgtccaaaagagcgcagttggcttcaagttcttttggaaactccccagcatatggaaacctccccaagattcctctggcctcctcagccgcctgctgcccccactcccagccctcctcttgtcagcccagacggcggagcctactctctttcagcttcaggcctccgatggaacaaaggaagtttcacagtgggtctctctcctttattaaaaccagcaagagctcttcaaggaagagagggtgggtgttgggggtatggaaagcagagagacagtgatctttccagaaactgtgatctttatcaaatgcctatcagcctccgacaggtatgaattaactttgaggaatgatatatgtgtttgtataaagatatgtatgcacatcccaccatggagggccctgaacatccctcagagagatttagatctgatcctgatggtgctgaggagccactggtggtctctgagcaagggagcaaactgctctcagttttatatgagttctgaagcatcatcagctcccagacattgcaaaacagctcccgaaagccacgaatggtctccccacacccctgaggatagcctggtggaggctttagtatggaaaccagaaatacttactcctagttagtcctcattctattattacgctgggccatgggcctcttctctgaacctcagtttcctcatcaatgaaatgggaagaattgtttgtcatgtacccaaccacacacataagcaagctaaaaaacattttaaagtgatgtctgaaggaatgctatttatggcttaggcatcaaaaatcacttgacatgtcttcagaaaagagaaacttgccaggtcctcagtttcaaaaggaaagcctccaactccttgagaactgtccaaagaaagacagcttcccccaccactgatgaactgattgatcagcagagaaactttctgtttttaaaatgttttgatgtagggtgcagcatattatatatgtaatatccaaataccatatttatatatgatttggatataatatacacatgtgtaatacatgttatatatcatatgtaatatataacatatatgtaatgtatgtgtgatatacatatatataaaatatccaaattttatatacgtgtgtgtgtgtgtgtgtgtgtgtgaacattccagaaatggtggcaagagtatctcccatctcacctgatcttctataatggaactttgatgctccttctaccgagaggagaggtctatgcccactccccttgaatctaggcagccttataacttgtttgcagccagtcgtcaatgatggaagcgatgctgcatgacctttaacactgagtccttaaaggtgatgtggcttccctgagacaccatgccatgaaggggcccaagatgcggccatgctgtgaggaagctcaaacaatctgacccagaaagccctcctggagaggcttgtgagaatacacagacagggagagatgtacaaccagcccccggctactctggacctctgatttctagttctagttaccttctgactacagctacatgatggaccccaagacagaactgctcagctgaacctttcctgaattcatgacccacagtaagtgtgaaagataataaaatgattgttgtttaaaccactacattttggggtggtttgttgcacagcaaaatgtaactggaataaatggcaaggcaacaggttgatacaaggcccaggaacggttactagtttgagcctccagggatactgcctggctcagtcttctcaaccaaccaccagaagcttcttctctctatgcttcacatttagcaaaatggcacaccctccatccaagccagcatgtgagcctcctccttcccagtcacttaaatggactcctctgccctcaagaatcagcacccatgaaatggcaacttactatcatcttccccatctacctccaccccaaagcttagaacgacggacctcagccttagtgcctaaaaaaaattacctaggatacctctacccctccctaactctacccagattctgatatagcaggtatggaggagagccaggtagttctgcccgcaggtggagacatttattccaagaaggtcagaacccagaatgtgaagtgccactttgcctggaatgtaagtctcaaatgtcttctccaaggagccctgttgaggctggcagctcctttcaccctcatgacagggatttttttttttttctggattcattctgaagccacaagcttttggtctcccatgaaaagttttttgctatgttggatggaaatcactgctctgatgctaaccgtggcagaggcatgaaaattcagagctgagagcatccaatggctctcccatgacatctgggatatctctggctgaaagctggggaaatggggtcaccaactgctccattagcctactttgggtggaccctccccttcctgaccctcacagcgtccggccccctcacaccagttattgtgcagaaggagattgtccgtccttccagcagaatggagcccagcagtgctcaccccttacccatggtccggccaccacgtgtggctcactctgtccttttcagggttcatcccagaactggagctcacattcccagaaggctttgcttttcaggcttttcaggttatcgccaattgaggctaaatgctctgacgttgtgtctttgacgtgccaaactgttcacttgttcactggaaacatgtaatatatctcatactttatgtaacttgcttttggtattccttcttttttttctttttttattttcttttttgcccctaatattttgagaccttcagaaaatcaaagcagcccaggtcttgctcaagttctgattctgagctgctccggtcatcatcacatatttgtttcctgtatacggattcttactttttctttggctattttgatcctgactccacctgtgagagataataaaatgatgataaaaagatttaagcttgctgaaggtaaggacctggcctccttcttgtatcccccaaaaccaccttgttcacagagcccagggtcatgctagtgcatgaccacaccacagagtgattttatttttatttattctattattacttttctttctcagacagggtctgacactgttgtccaggctggagtgcagtgcgtgatctacaaccttctcctactgggctcaggcaatcctcccacctcagcctcctgagtagctgggaccacaggtgcacgccaccatgtcccagctaatttttgtatttttgtagagacgggttttcgccatgttggccagactggtctcaatctcctgggttcaagtgctgtgcctaactcagcctcccaaagtagtgggattccaggcatgagccactgtgcccggtgggttttctttctcttttttcttttcttttcttttctttttttttttttcttttttttttttttttttttgatcgaattttgctctcgttgcccaggctggaaggctggagtgcaatggcatgatcttggcttactgcaacctccgcctccccgggttcaagtgattctcctgcctcaggcccccgagtagatgggattacaggcatgcaccaccacacccggctaatttttgtatttttagtagagacagggtttcatcatattggtcaggctggtctcgaactcctgacctcaggtgatccgcccgccttggcctcccaaagtgctgggattacaggcgtgagccactgcccccagcccggttttccttctcaacgagctgtatggcctctctgaacttgggtaccctcacatgtataatcagggtgataatacccgctacctggtgggattgtgaagaaaattaaatatgattctgtgtgcaacctacctaccatagtgcctgactcaaagaaggtgttcagtgaatcatagttcttagggttgaattgtgtcccctccaaaaatgatccagtgaagtactaatctcctgcccctgccaatgtgaccttctttggaaatagggttctggtagatgtcatcaagttaagatgaagtcattgtggattagtgtgggctctaaatctaatgatgcgtatccttgtaaggaaaaggaaatttggagacacacagagggaagagggccatgtgacgacagagtcaggaggtggagtgatggaagcacaggccaaggaatggcagggattgctggccaccagctgccaggagaggctgggaaggatagaggctgtgcctccctccctccagaagctggaagaggccagaaaggatgaaggctgtggctcccccaacttcagaagctggaagaggccaggaaggatagagactgtgcctccctccctccagaagctggaagaggctgggaaggatggaggctgtggagggtgcatggccctgctgacaccttgattttggacttcttgcctccagaaatgtgagacagtgaatatctgttgttctaaatcacccagtttggggtactttgttatggcagccctaagaaatgaatgcagattttcgtgctggaaagtggagtgtctgtttgggatgaaaaagagaggagccacctagacactggtccaggaggctagtgctaaggcaaagcaacccacaggcaaggtctcatcccctcttgcccggggcagctgaagacaaattccacgtgccttcctccccagtgcttctcagcagcctgcaattccatgggaccaccgaccgtgacaaatgtggccaacagaaagcttttattaataggaatttaatttagaatttagtgcaaaaatgtatttcttggccaggcatggtggctcacacctgtagtcccagcactttgggaggctaaggtgggcagaccacttgaggtcaggagttcaaaaccagcctgggcaacaggacaaaaccccatctctactaaaaatacaaaaagtagccaggcgtggtggtgcctacctgtaataccagctacttgggaggctgaggcaggagaatcgcttgaacccgggaggtggaggttgcagtgagctgagatggtgccattgcactccagcctgggcaacagagcctgactctgtctcatatctagttacctctaaatctccaaatacatatatagatatatttggagatatatctatatctatatctacatatttggagatttagagttaactagatgtagtttctctcctgaaggaactcagataaacagggcattgcttcacagaggaatcaggccacagtggggataagcagagcaccatagcagggcaccagcaatggccacagattatgctcacatcaaggcttaaagaacatgtggacatcagccaggccaaagaaggtggtggcatccaggcaagagcatgaccaaaagcacccagacatgaaacagtgtggcacgtgcacacaaactgaaagcagcttggagccaacacgctattgaacaggaggaagaaatgaaatatgaggcaggaaagagagggtgggagaggccagctgatgagatgtttcgtgttccatgctatagagcttggaatttattctgtaggcaatgagatgcttcttctctaggacttaaagcagaaaagtggcatagatagattttcatttaatacagaccatcctggctaaaatgtgtcaatggattacaacagaacaagattagaggcaaatcaactaggtacctgctgtgagcagtccagatgagaggtggtgcagctgtgacttagggaagtggtgctggatgggaaggaagagacttggggagtgttccaagggtgtccgcgcttgagctccccacagaagcaggacctgtgacaagggctgatgtgcaggctgtttaggaattgatgccaagtaacagcaatgggggctgggaggagtgaaagagggaggtgggcttggtgtggtggctcacacctgtaatcccagcactttgagaggctaaggcaggagaatcgcctgaggccaggaggccaagaccagcctgggcaacacagggagaccgcatctcaacaaaaagttttaaaaattaaaaattttaaaaatagtgggaggagaaagaagcatcccagtgtggtgttattggcctggttacctccatgggctgctgggactggatcccctggagaccccctgaggaagcgtgtgaaagatgcctcagaattgtccacccaagacatggatggaagacagatgagctcatcagctcctgcccctattggtcaaagttttcccccaaggaaagccacctcccttgagcttccaagtttacacacaagccagtatagctaagcaagtccccgcaggcttggacagaaagcctgccacagcagatacccactgccacagctgtcaggtgacagcttgttgcggttgtcagagcaacgcccaggagcaaaaaaggcgagccaggtcaggcgcagtggcaaactcctgcaatcccagcaatttgggaagccaaggcaggaggattgtttgaggccaggagttcaagaccagcttgggcaagaaagagacccctgtctctacaaaacataaaaaattagccaggcatggtggtgcgtgcctgtggtcccagctactcaggaggctgaggcaggaggatagcttgagcccaggaggtcaaggctgcagtgagccatggtcgtgccagcacaccctagcctgagtgatagagcgagaccctgtctctaaaaacttaaagaaaaaaacggtgagccaagagcatgtgaaaggagcgtgaaaggagcatgaaagggaggtgggcagaagaagctggttggatagaggaagtgaaaggaagaggcgcatttgtacagacagccgcccttctggaccgagtaaccacgtggagagtggttctccatccacccacataggacgcacaaggaaaagaagaggttcccaaagataagggatttcatggggaaaatacctcatcgaatggactgcgaccctcaagggaagatgttccataagctcggcgcgagtcaggcagtagggagaggtcttgagatcacaggtgaagtgaaggctcccaggaagggtgattgcagggcgagggcctcctgacctggagacagggccccaaggaacagtcatacgaagagggcagaggacaaatgaagagggagtggacagaaagagaaatgggaggagagccatgtgccaggagccaagtgatttaaatgcaggtgtagtgccctggagagttccatgtgtaagaacaagtaaatcattgttgcttacctctcccttgaaaaaaaaaaaataccctgcttcttgtcctaagttcccaggctctctttttgcctactccctccccagttgctgagtccagtcaaccctcctgctacagtatcccctatagcgccattcacctgccctcctctgctcccttggccaacatctaggttcagaacctcattgtctctcttctggtctgtcctgcctcctcctccctctgctgctgtccatccaggtggattttcctaaagggaaaaggtgcacttgagggcaaatttctcttggccatgcacttaggagggggatttctgggtaaaggggtaagttcactgcttttctaattctctactttttccttatcctcacccataaatcttacaacccccttgaagtgcaataactttatttctaggacctctcagagcctttgcctgtgctgttcccacttgccgggaatgcctttcccttcatccccaatagttcaagccccaccttttcctgagcccagctcagatgccaccccctcatccaggaaggcctccttgatacctccctaccagaattaatctctccttctcttgtggtctgaagactcttggctttctcccctgtcctatttttgcttgttatcactgacattgctttacacgctttttctcctctgctgggagcaagggcagtttctatgtcacaatgccccactatgcccattaagctacagtgcacatggtacccatcccgagaccaacattctttttacacttctgtgcttctgacctaggaaagtcttacttttcatagagtgtcatagctgagttggaagctcttttcttagagcctcttaaaataatggcgtgccttatagtcaatgatctcttacattccattaaatacagtaggagatgttcaaccaatatttgctaaattggaggagttaaagtcattttgagtaggagagggaatctagacccactatttggattagtacagattttagtgcaactcagggcttctgcagagcccctccagctttcacctgtccacttagttgatgatgagcacgcctgcgaactcttcacactttccaaacccaccaaggcagcttctcccgtaaggacatgtttcttaccttcaagacccctgttgcctccagcagcaatctcagtaatgacgtctacttctgtttcctgcttccttctccctgactcctgcttcctggagtcccctcagataaacctcctgtgcccaagaccttgtcagggtctgcatttacgggaacccaactaaaattccaggaccaccatataaaggtccctttgtcgggggctgggcctgctctggatacggtagggaagtggctccagggtctgcggccagcgaggagagggtccggcagtcaccagtgggagctgtttcctcccgtattcctcccacctgtccctacctgtcctgctggcggggtaaagagtgggatttacctcgtgacagctgccttacagccccatgaaaaggcactttgggctgcggttggggggagcgcatctccagggattgcagggtaggaggacaagaactctccctggcctgggagtcagggaaatggagagatcagagcaacacaagtgctgggaacagatggggcttcctgggctccagcgctaattaaccagctctgcagctcaaggcctgggcctcatgatagtagtctgagggcccctggggtgcagggttgagcacacaaggctgcacacaggcagagggagaggggtgatcccgggaacagccatccctccattccctaatccagaggccgctgcccttcttgggccagagagcagcagcttctaatacagatctgggcttctcactcagcaggtgccagggacccaaggagacaaatggaggaaaaagagtgaggaactcctgccccaaggaggccgctgccaccgcccactggccgcatgccaactggaccccagatgataagcgtgaaactcccagaggttgagattgggagactctcctcctccctgcctttcatcttgtgtcccctctcttgtcccttcctcacttgcaagaacagaactcatttgatgtgtttccgctaccaaatcagagcagtgagtgcagagttggggaggaaattgaagggaaacaattcaaactgtttcactggagttgcaggcgctgataaaggcatcttcgttagttaatgagttaatttctgataaaccttagatacctaaaataggctacatattatatggcctaaattgattcctaattaacacttgaaatgtaatcacaatcaaggtggctttttaaattgtgggcaagagaaagaaatacatctcagacacaaaacaacctgtacttaacactgccataaagtggatcaggctgtatttatatttatgtttgtattgaggctgatttttctgattctctcccagtttgggtgttttatctctgaatccccagtgcatagcacagtcctggcttgtagtaggaattagcaaatatctgttgaatacataaaccctcttttcaaaatacaggaccagagcatagaaacagaatagctaatgtacactcttttgttgaatggggcaagcacagcccaggtagcaagtaaatagtgacaaaataattctggaattatctcccatccacaagccaggatccaaaataaatgtcctttgttctacattgttattgttttttaaaagtcattttcttttatcttctaagatacttatggatagaataatataaagtctggatttgcttcaaaataccttagcagactgggattatagatgagacaagaccagctgtgtgggaataattgttggaactggctagtggggacatagaaattcataaaactatactgtctacttttgaaattaattttcaaaaatatgcttgaaattgtcctttataaaaggtttttattactccatgctaggaaaaatgtaattgaaactaagtagtagaaatgttagaaaaacacaagcaaacaattcacaaggttggtgccatatccctttaggacatatatgctcactgcagcgcccacgggtccagttggagagatgtgatgctcacagagcctgtgtccaaggactttctttgccgttatctcgtggttctgcaaatacacgctcaaggctgccaaaaatgagtgatagtaaattaccccgctaattcaatgactcttcttcaatagaaactgattacaaagaaaaaaaagtagtcaacaatcctaacagtatttcagcagttcttgggaacattttgcagaatgtaagggaagacattaacaagaaatttctagcaaaattccattacttcaagtagtcttgcacaaaatgtgaggcagagggggtaaatgtatatgcccttacttttgatgatgctgttttcttgttaaaaaaaacatcttctggccgggcaaggtggctcacgcctgtaatcccagcactttgagaggccgaggcaggcggatcacgaggtcaggcgatcgagaccatcctggccaacatggtgaaaccccgtctctactaaaatagaaaaaaattagccaggcatggtggcgcgcgcctgtagtcccagctactccagagactgaggcaggggaatcacttgaaaccgggaggcagaggttgcagtgagctgagatcgcgccactgcactccagcctagtgacagagcaagacttcgtctcaaaaaaaaaaaaaaaaaaaaaagcatcttccatgtttgggtttgtaggatgctttcagttttagccacttgttaagatttttattctgtctttcctgtgccatttagaaattctgttgtaaaagcaatttaatgtacctagaaatttaaacttcaattctaatttcaaaacacaactaagtctctaaatatttactaagtaatattcaaataaatgccatttcatctgaacggtaaaataaaccagcatgcttgaacattttaatgggcttccaaatgctatcggaaagatcaagctgtcctgtcagagatcatccgtggattttcaggaaatgcactgcaatgtcacataacccatctttagcctggcctttgagcaagcaagcaaaaccattctgcaaatgctgaggctgtatttccagaggcattccaaaatgaccttggaaatgcaatgcaattagtataatatgtttggagtgggacatgctggaattaaggcaaaaatagcatacatattatcgctgaaacagaagcgatttaagaagagagagcgcaactctaaaggatggacctaaaattaaaagtagtttaaaaatacatatgtatttaaaaaatacacattaaaaaatacatatgtctaggctgggcgaggtggctcacacctgtaatctcagctctttgggaggtggaggtgggaggatcactcgagcccaggaattcgagaccagcctgggcaacgtggcaagaacccatctcttcctaaaataatacaaaaattagccaggcgtggtggtgtgcacctgtagtcccagctactcaggaggctaaggtgggaagatcacttaagcccaggacgcagagacttcagtgagctgagatcatgccactacaccccagcctgggcaacagagccagaacctacctcaaggttacatgtatatgtgtgtgtatatatatatatgtgtgtgtgtgtgtatgtatacatgtatggatatactcatatacatatatgggagcagccatttttatggtgaaaggtgggaaaagtcacacaaaataatatccttattttgccaattataataaccatttattgagtacaaatatgggttatctcatgtaatcctcatctctgctcacccagataactactgtatgatttccactttaaggtgataaaaactgatgcctgggaaggtcacgtgatgtaaccaaggtcatccatccattgagaaatccctcccatctcccaattaccagccatcgactgtactgaaagcttatgaatataaatagtggtttacccagcattcattctgaaagaatctctatctagtcgtatatttcagaatgtttttcatcttccacccttttctaaaaacactttctccatctcctaaacaagcactcaaaacgaatgacccctgagggagatctccatggacaaaccaaacattaaccttctggaaagcagctgattatctccatatctgggcaactgtgagttatactgcaatgaatatgagtgcagatatctctttgaggcactgatttcatgtcctttaggtatatataccagaagagagactgcgggaccatgtggtagttctttctttaattttttgaggaacgtccatactgttttccataaattacaatggaatatcattcagccttcaaaaaggagatcctgccatttgtgacaacttggatgaacctggaggacctggtgctaaatgacataagccagacacggaaagaaaaatactgcatgatattatttatatatggaatccaaaacagtcaaatacatagaagcagaatagaatggtgattcccaggactcgggggaaatggggagatgttggtcgaagagtacagccttgcaggtataagatgaacaagttccgcagacctaacatacagcatggtgactataattaacaataacgtgttatatacctgaaattgctaagacagtagaacacttaagatcttaagtgttctcaccacacacacaaaaagtaaccatatgagtgacggatatgctaattagctggattgtggtaatcatttcatgatatatacatatatcaaaacatcatgttgtacatcttaaatatatacaatttttatttgtcaattacacctcagtaaagctggaaggaaaaaaaaagtagctgatttttcagtaggattagagccagggctctcagtgagaagttctgcgaaaggctggaatggacaggactttttggtagaaatgaaaagcaataaacccacctgcggacaaccaagcaggtcgtgacattgcaggactagcagatggtacctaaaatgtcactgtagtctttcccacctcactgattggcagctgtggctcaggctaaaaccttggaggcatctttaactccactctctctcccttttacctcacatccaatctgtcggcaaatcctaaacttctaaatatatccagaatatgactgcttctcacacctccgttgccagcacctccggcagggcccccattgtgtgccgcctggattctcacagtcgcctcgctctgtctcccagccctacacagtctcttctttgcacagcagtcaaaaagctccttaaaaacccaagtcagatcaagtcagctccctgctctgaaccctgaaccctccaggggctcctctataacattcagagtcgaagtcaaagtctacaatgctccgaggccctacaccatctacccctgtccatccttctgggaccttcagctcaacttcccctctagctgctccattccatgcatgccagccccactccccattctgtgttcctcaaatatgcagggcctttgcactaactctgtcctccccagatatccccagatatcctcctgaatccccagatatcctcctgaatccccagatatcctcctggctcactccctcagctcccccatgtctttgctcagacatcacctttggacatgatttggatctgtgttcctgcccaaatctcatgtcaatttgtaattcccagtgtagggaaggtggggcctggtgggaggtaattagatcatgggggtggatttccccacttggtactgtgttgatggtgagtgagctcttgtgagatctggttgtttaaaagtgtatagtacatccggccaggcgcggtggctcacgcctgtaatcccagcactttgggaggccgaggcgggccgatcacgaggtcaggagatcgagaccatcctggctaacacggtgaaaccccgtgtctactaaaaatacaaaaaattagccgggcgcggtggcgggcgcctgtagtcccagacactcgggaggctgaggcaggagaatggcgtgaacccaggaggtggagcttgcagtgagccgagatagcgccactgcactctggtctgggcgaaagagcgagactccgtctcaaaaaaaaaaaaaaataaataaaaggtgtatagtccctccttccctctctcttcctcctgctccagctgtaagatgtgcctgcttccccttctcttcccaccatgattgtaagtttcctgaggcctccccagaaacagaaatcgctatgcttcttgcacagcctgcggaacagtgagccaattaaacctcttttctttataaattacccagtctcaggtgtttcttcatagcagtacaagagtggcctattacaccttctcagtgagatctgcctcaacttccctattcaaaattgtaacatcttctgcccagcactcccagccccctaccctgcagcattttaccccataacacttatcaccttcttacctttaaatgtgttcctttccttacaaaagcatagcttgtaaaatccaaagtcttgtttccaactagatatcatctgcctcctgatgccatgcaaatgcacatagcaccagctaggaaatattcttgtcacaaaaacttgatcctgaatttagtcaaacttctccagctaacttccactcacttggaatagagggacaagagcatggcaccataaggaagcatgcagacaaatgctgaatgtgggacattctccaagacaatcgacctggtctctgcaacaaaccaagggaagggggattaaaagagaaaataatggagactgcggtagatttaataacacttacaagatataacaacaaaatgccatggggagaacctgctcaaatcctgatttgtgccaaccaacaataaagagacactttggagtcaagtaagtaaattttattatggactgaatattacatctagtatattaccaaagaaatagtgtgcactttgagaggcataataactgtattatggttacataagaaaatagtaaccatttttagagctattaatatgtactgaaatgtgtagagatttaatgacatgattttggggacttactttaaggtacttcagcatattgaaaagggataaatgggccaggcatggtggctcacacctgtaaccccagtactttcggaggccgaagcaggaaaaaaaaaaaatgacctggcatggttgcacatgtctgtagtttcagctactggggggtaaaagagggggtattccgaggtgggaggatcacctgagcccagggctgtcgaggctgcagtgagccatgatcacaccactgcattccagcctgggctacagagttagaccctaactcaaaaacacaaacaaacaaacaagcaaacaaaacaagaaaagagataaataaaacatgtaacaagatttgtttttaaatcaggcctattgaggtttacatacaataaagttcacccatttaaagtttgattagttttgacaaatgcatacagttatatgaccaaaaccacagccaagatataggatatttccttcaccctacaaagctccctcatgtatgctgagatttctataattcttggatctagaaatgagtgtgtgaggattcactgtattattttcttactattgtgcataacttggagcagacctggcaaatacgatctggaatttttctgggggcatgtgatgactgtaggacctagtgtgcatgacaagtggacagatggataactgattctgaaacttgaaagagaagtgtctcagggagaattcccagaagccaccctgagacaaggattcatgtgtaagtgatttattaaggacatgacgacgagatccagcatgaaacacacaggatggcctagaaaatattttgctggtcgggtgcaatggctcatgcctgtaatcccagcactttgggaggccaaggcaggtggatcacctgacgtcagaagttcgtgaccagcgtggccaacatggtgaaaccttgtctctactaaaaatagaaaaattagccaggcatggtggcaggtgcctgcaatcccagctactcgggatgctgaggcaggagaatcgcttgaacctgggaggcaaaggttgcagtgagccaagatcacaccactacactccagcctgggcgacagagcaagattctgtctcaaaaaaaaaaaaaaaggaaagaaaatactttgttaaaatagctgaatctattccaacctctagaacttcctttccctggcaaaaatggaggataaaggagagaaaggccagaaagtaacttgatccacccacttgctcaccccagaaatcaagggacatctgaacctctcctactctcaaagaccaccaatagccatccagtcagaaccaagtcctgtcaattccctcccaaaataaatctcccacccacccatctatgcttatcctcctactaacccaagcgaggatcccctctcacctgcatatgtcaacagcatcccaatttgtcttcctttcttgccccaaccccacccattctgcacagagcagtcagaattaaaaggaaaatcaggtcatgtcactctcttgctgaaagcacttctgtaaaatagtttggcaattcctcaaacaattaaacatagagttgccagcaattctactcctagaaatatattcaagagaaatgagaacataggtccacacagaatcaccatccaaagcccagacctcccaattcttacattggggattaaatttcaacatgaattttagaggagacgaaaacattcaaaccataataggacataaacttgatttctcattgataggatggatgcaactaaacagctcaacagtgttgattaaaaatgcttattatgatagaggaaaatggcagataggaggcaggactaacttgcagctcccactcggatggacagagcagtgcatgaagacccacatcgtcaaattttactccaagaactaacacaggatcataccaggaaaaccaaaagaaaccacagaccctttgaaggcggtgaattgctgctgcaggctctgtgtcccctacaaaatgcatatggtgaaatcctagcccccaatgtgatgctattaggaggtggtgcctttggaaggtgattaggtgatgaggggggagccctcaggaatgggattagtgcccttgaaaaggggactccagaaagtctctcaccctcttcctaccatgagaagacaagtgtacaactcagaagagggcctcaccagcccccagcaacgctggcatcctgctctcagacttccaccatccagaactgtgagaaatatgtttctgttctttataactatccggtctatggtactctgttatacaccccaacaaagacggcccctgtaagaattctgctgtgtggtcctggggagggattgagcaggaccaggagccatgattccagtgtgtgaccctggggaaggactgagcaggaccaggagccataatttggtgtgtgaccctggggagggattgagcaggaccaggagccatgattcccgtatgtgacactgggaagggattgagcaggaccaggagccacaattccagtgtgtgacgctgggaagggattgagcaggaccaggagtgagcaggaccaggagtgataattccggtgtgtgaccctggggaaggattgagcaggaccaggaaccataatttggtgtgtgaccctggggacggattgagcaggaccaggagccatgattccggtgtgtgaccctggggtaggattgagcgggaccaggagccattgggcctggtacatacatataaatgagtgaagagagcagaaatgtctgcaaagcaatcacataggaatgaatattcttcacatcccaaaggaaatgtgtctttcccatttttgttgagacaggcagccctccctgggtgttttactctcacttttgctagactcataagtaaaagagaaattatttctaccagaagacataatttgcaattgttaagatatggaaaatatggaaccagcccaaatgcccaacaatcaatgagtggataaagaaaatgtggtgtatacatatttatacatatatatgtataaatatatataccacattatatattttttatatataatatttatgtttatatttatatttatattccatggtgtatacacacacacacactgtggaatactactcagccacaaaaaggaacaaaatagtggcattcacagcaacctggatggaatttgagactattattctaaacgaagtaactcaggaatggaaaaccaaacattgtatgttctcactcataagtgggagctaagctatgaggatgcgaaggcataagaatgatacagtggactttggggactcaggggaaatggtagcacggggttgaggaagaaaagactatacattgggtacagtgtacactgctctggtaatgggtgcaccaaaatctcagaaatcaaaaaaaaatctcagaaatttaaaaaaaataataataagcaaaagttttgaatttttaaaaaaatttttaaaaagaaaagagaaaaaaagaagataaccgcgcaagggcagctacaaatgacaagtgacacttggcttcaggctcagggaggcagtgggagtggcagtgtagtggatgcggtgatgctgcccacctcccctggcaggacggggacatccttccctctgctgctgggagtgtggttgctgacagctctcgctggggacgttccctgggaatcgccctcctctggaaatagccaccttgcccaacaacttccccctcctgggggcaacccacatccaatgatgattgatatggctccttccttgaggcaggacaacttcaaaagaccatcctagctcctgtgggatgggctaaacccttggttgtgacagatccactgcactgcagttcagcttctccatccaatccttctttcttcattcacattacctgtgttgatcctgagaccagtccccaagaaactcctgactgtaaatcccatctcacagccaacttctcagggagccccatccaaggcaggtggggctgaggcttaccaggagtgggtggctgctgctctagctgttgtcccatgctgtaactgagctagatcttgcaatctttcaaaagaagttacaaatctctaactgtatgtgaaatcttgttttgttttgttttgttttgttttgagatagggtcttgctctgtcatccaggcttaagtgcagtggcaccatcacagctcactgcagccacgacctccccagcttaagcaatcctcccacctcagcctcccaagtagctaggatcacaggtgcacaccaccagacctggttaatttttttttttttttttttttttttttttgtagagatgaggtctccctatgttgcccaggctggtcttgaactcctgggctcaagcaatccttccatctcggcctcccaaagtgatgggattataggcatgagccactgcacccaaccaaaatcttgtaatctttaaatgtcagtttgcttcttggctatctcatttacaatctctgaagtcaaaccttcttcaccaaagatcataagtcttaatcatgaaatatatccagtctcttgaaaccagtaaagcgaatctatgtactcctgcattccaccttatcccttcaaatcctctgatgattggccaaatatgaaaagagatcataacagcactgacctttatgtaggccatcaatcttatttcacatccattgtctattttgatgacgtctttacactgtgtcattcgggtcacaggttaatgatctactttgtattcactggaggtgatcacagtggagtctcaggtgggccacaagttgagacacaaggacatcatctcctgtgtggtggagatgcccaagtttctcagcctctcactctcccacccacttgccttgtcctcaagcattggaacagagtcacttgccatgttgatctagatcaatgaaactttagagcatgagttttaaattttaacttatttctgaaattgttgatgcagaatcaatgcacacaactgtgcaaaccagggttgagtggcccagttctcccctacagctccctgcgtgcggtaacttatagacgtccctaacactgaatggatggagtctggaaaccaccatcagaggtggtctggctacaggtccacatgcatcgttagcccctctccatttctcacatggcttcaatcaagcagagatttcatctccgtctgcttctgccagactatcaatccaaaaagctaatgggacacttgtttgttgctcccctctggtaaaaagaaatgcctgttgcttttgtgcttccatgacaggaaggcagccagttggttttgcccattcataaccaaggttaagttccctgactagctggagggcaccacgtctgtgtctcaggtcagctagcacttttcactgcactgctggcattaatttggcatcttctcctgaccacagcatgactgtgaagccagcaacattctccttacaggtcacagaaaaataaatactaccatgctatctgtccttttcatcagattctgctaggatttgcctggcatgcagttggcactcgataaatacttgtgaaatgaacaaatgggtatcagcaaaggcagtttctgaatgatattctgatgtaattatttggatgctcagagtttaaatgtgagtccctgcctttaccaaattattccacctctaccctcaagtaggtctaatgtccaatattgtggttgtccttaattaggtgacaaggctaccaaaggccctacgcgacctgcccctaacgcacctcttcagcctcgtgtctctgtctccctcttgctccacccacagtgtcccagccagacacaactcactcactcctgtaatggagcaggctcagggcctttgcacatcctgctctctcggctggaacattcttccaccaccaccactggcctaattcattcaaacccactcttcaagccccagagttgatgtcacttccctgggacaccttcccaatctcctgactcccgtgggttacgtgcacttcccgtgctcccgacatgtccttatttcagttctcatcaccctgcatggtaacggccttgctgcctgtggtacctctcaccaggctgtaaaagtcacgcagagaagtgtgtctgctgttgcatcctcaggccccaacaaatgggaaatgctcgctacacatttgagtttttgttggttgcatgaatgaatgcatcagccatgagagctctattcttgtgccctccaggagatgagtaaggtaggatttggagaacagattttggaatcagacggacgtgagtgggcagcctgaccccacccttacttcttcatgtaagacaacagagtaatcccagcactttggaaggccaaggtgggtggatctcttgaggcccggagatcgagaccagcttggccaacatggcgaaaccccatctctactaaaaataaaaataaaaataaattagccaggcatgtagtgcacacttgtagtctcagctattcgggtggctgaggcatgagaatcacttgaacccaagaggcggaggttgcagtgagccaagatcatgccactgcactccagcctgggtgacagagtgagactagtctcaaaaaaaaaaggtaatagaaaccacttcagactccagatatctgaaacctaagaggaatttattttttttaagtattagtcagctcatagaagctctgggaaaggtgaggaactgagtgtgccactgtactggttctaaaacataagcaaaacttcttagacagtcccctcatggaaggaggagtctaatcgccacccctccttgaatatgggctagccttagtgactctctcttaatgaatagcacatggcggtagagatgctctatcatttccaggtgatacaacttctgcctgactctctctttctctctttttctctctccttctctctgtgtctgtatatctctctgtctctctgtctccctctctctgcatgtgtctctctgtctctctcttctctgtctctctgtctctctctctctctttccttccttccctctctcaatgttctcccttgggacctcgcctccatgttgtgaggaagccaggcagccccatgggaaaaccacatcgaggtgtctggccatggccccagctaaggtcacagccaagagccagcatcaaccaccagccacatgagcaagcaggcctcagatgatcctagcccccagccttcaagccactcaaccaatggtgagtggagcagaaatgattgtccctgccaaaccctgcacaaattatactttcaaaagcaaaacgaatgttgatcctggtttgagctcctaagttttggggtgattgcttacatggtaatagataaccagaacagcaactctgcagccacgagcaccacctaaattgtgccacaggagctctgcagccagggacccagggttgctctgaggcccttacagttcatcccatggttgccagaccccacagtcagtgctagaacttctgctgtgttgccactgttgtggccatgatgagaagaacaaagggtgaccaggcaatctcagagtgcgtgtgctggctgcaagcaggggctcagaggagggcacagctctgctattgaccagctgtgtgagcttgggcaagtgtcctaaccactctgggactcaactacttctttctgaagtgggatcagtaggggtaccatatgcatggagtggttgtgagaattagacaaattaatagatacagatgatgagaacagtgctgggctaatgagtatgcattattctctacctcgggccccccatcacttcctatctagtacgtgatttccttctagcagctgttatcactacatgaccttatcgcatgtattgatgtgctctcttgtttttggtctgctctccttcctgttgggttgtaagctcgatgcaggaaggaagtatgttttcctgtcactgaatcttcagcacctagaagagtaggcgctgatatatcaggctagatgtgtcaagcacatatcacacgctcagtgaatgtttgctgagcaaatgaatgaagtggctgataatatcaccagagagctaagataggacctcaaataacgctaatacaaaatagacaccataaggcttgtgagagaggtgcacaaagctaacaggcttcaaggaaagggaaagaaatgaaaccaatggggaattctagaaaaggctttggagaagggatgccacaggggttgggcctcaaaggagagacaggacttcaagagatgaagatgtaacagaagatgggactgagagagaattagtaagagccaagaccaaagtagggaaggacaggacatgcttagggaagggccagtggtgcccttgggctggtctacagcaattgaggttacacagactggctaagaccattgtcacaaccttccagtgtgtcccccaaagggtaaaatattctccaggtcccaggtggattcagtgcaagcacctcctgttcagctccacctgggcctgactcttcccgtgctgggtgagctgagaatgatccatgcagccaggcttatggctgaaaggatcccagagattttcatccttttccttttgtaagaacacagacacagaggttgggctttcaattctaaattctaaagaagagaagatgccccatcttcaggaggccaccctgacaacgtctagcactgggacaaacaattgcagggagctccaggagacaggtggggaagaatgtgtgaacagaactgactgctattgaatttaagatggtattatgttggtgcaaaagtaactgtagtttttgccattacattttttttaaatgacaaaaactgcaattagttttgcaccaacctaatatttaattatttcctgcctaaaaatggggacataaatgaaatattcattgactgaatatattcatgttatataaatatatatatttatatatattatatatatgtgaatatatattatatatatgtgaatatatataaatgtatatatttatatatatgtgaatatatataaatgtatatatttatatatatgtgaatatatataaatgtatatatttatatatatgtgaatatatataaatgtatatatgagtatataaatgaatgcccaagagcatggcgcaccaaagagagtccaagttctgcttggcttatcaaagggaacatcctcctcaaaagaacatgtgggagacggcagaggagcaactagtgtgtgtgttttctcctacgtctaggaggaaaaaactaaatctgtcactttctgcatgtattcacattaaaaaaggattcaaagctgtctatttagaagacagtgccagtaccaatttctgtgccagggagatgatattttgcagttcacagggtagaaagaacaccatttttgtcacatgtttagtattccacaagcagtgaaagttagaataattacctgtgaacgactatgtatgtttctttcatctaattaggtaatctgcccaggtgtttaggaccaaggcctctctaggctttaattagaaaaagtctaggacagaaactaattagcagcattattccaaaccagaagtctaatgatattaaccacaaatcgctattgcaatcaggagcctttattctaaaccatttttaaagtgagggaggaggggaagaagacaaggtatttttcagctttagaatattgacttccaaacactaattccagtcaactttgatccactctctcaaagcaatagaaagaactgtgattaacaaaaaggcagtacagaattaaaagtcaatgaatatttcatttatgtccccatttttaggcaggaaatgattaaatattaggttggtgcaaaactaattgcagtttttgtcttttttttttttaatgtaatggcaaaaactacagttacttttgcaccaacataataccatcttaaattcaaagcagtcagttctgttcatacattcttccccacctgtctcctggagctccctgcaatttataggtaatgatctacatgtacctggaactttcaaagtgcaaatagatttttatgacctcaaaactctcctaaaattaccgtttgattcattctagttttcatcaaaataagagaaaaataaccaaattccatgaggaaaagtccatatttccaaggtagccaatgggctgctgtatgtgtaaaactataggcttttttttttttttgagacagggtctcgctctgtcacccaggctggagtgaagtggcgtgatctcggctcactgcagcctccacctccccaggctcagatgatcctcccacctcagccccccaagtagctgggactgcaggcttgtgccaccacacccggctaaattttgtatttttttctagagatagggtctcaccatgttgcccaggctggtttcaaactcctaggctcaagcaatccgttcacctcagccttccaaagtgctgggattacaggcgtgagccaccaccacacctggccaataggctatttttataatggggcttttctgctcacatctttggctcttttccagaattttttcatttcttgtagcatttacttaggagaactggtggtttgaaaacactagtagacacagagcacatagttttgatttgttttgttattagtgaacataaaatgacatggaaattttatatttcgggcacactggcattttaaataattaattaggtaaaagtaaaattggatgaaaagcccaatttagcatcaggctgaagacaaaagaagccccacatcaaagattaagaaactggaacacacatcaatcctaatttgttgtatcagtgcatttttcagtcccttctctccatggatgacttgggtttgctagtgttactagccaaatcccccaaggttagctcaatctaacttaaacttgagccccaccaggaaaaggaacttgaactatcattttgagtttcgattctcctctgattttctattcctcattgtcaaccttcaatatacctcccaatccccaaccaccccgcaaacagacaaaaatttagaaaaagaaaaccaggcttttcaaagaataaaattgagggatttgcataatttagtatctggctttcagaaattttttttaacaacagaaaaaaaggttttcattgcctctccctctggaatataaactgactctgcctcatgagaacatacctgtgtcccaagcattggccctcaagaggttgtggcttagaaaccaaagaatgtaaataaaacctgtgtagaaagtgatgttcccaggcagctgctttgggagcctctcctggtttgtttattttttttttcatacccgctttgtttaacacatgctaggtttttcccagctagctatcaaacattgctcacgtttaagggttaaaataatgtggtcattattgtactattcccgagaaacgggaaaaagagatctacagcagacttgctgcagctgttaggcagcccaattgccaaccacaagggaatttgcttacttctatatcacaatctcccaccttgataaaaaagaaaaaaacacacccatttcatttagactgtatactaagaataattgccaccaatattgattggccttttgggatccagctgaatttaaaaattgcagactgtgaaatcccagctgatgtatcctcactgagattactgcttatttgtgacaggttcctgtgtttaaacttatctatgaaaactgtgaaattaatatcttcatgttgagtacaatatggtaacacaacctgctgagacgcacagctatttttgttcttattattttaatgctggctcctgcctgtgccccactgtgaatctttctgataatgaagcataagtacatttgttatctggagtctcatgttctcactgttttctaactgtttattttcagggattgcacaaatgaggtttgtttctttttaagttttttttttgctgcacaattagttttatctggattttaacctagttggttctcacgctggcctccggcttgggagtaaaattactgcagttgacttctgtttctgcttcatcgtacacacctccgacacagaagatttgaagctagacgtttcctgacaagtgctttcgtctgctaaaatcagagaggaaaatgtgctagagtcttaactactaaatccacgtgattaacttataaagttcaaatatgtcaaatatggaaattcagctgtttctgaaactaatcacagctaaaaaacaaaagctgatcatgtggaaatgtgcctttaagtcacacaaacatatatgactctgacgctgaaaatttcagggagtcatgggctattggtctggcacacataaaagcagcagagaacaatgtcacttgctttccatgagactagaagttctttgtttcgtctgttattatcagagtcattgcagaatctcatcttcctctccattccagtttcatcccttcctcatattacacacaaattaaatgtcagttttgaaagaatcagggcaataccatttttaaaaaatatatatacacagataaaaggactggaaaggtgtacacaaaaattcacagagattctctctgcctttctggttacctgtgatttgtattttcttcttttcactaatctctatgtcctaaatttcctacaatgtgtagggatgaccttggtaacaggaaaacaattatattttttaaaaaaactgctataaatatgtaacacaacttctatacttcatgtggaattatatataatttcacttccaagttcttttaatgtgaaaattatataaacaaaaaattaatatcactatcaatattaatacttaaattttatgtttaaagaatttacttttatgttacattatttcaagttcattctgataaatctcagtgagtagtcaaaatgcaactgtttttttttttaatttacttattggttgactggttgcttggttggttggttcgttggttgcttggttggttgcttggttgcttggttggctggttgcttggttgtttgcttggttgcttggttggttggttggttgcttgcttgcttgcttgcttgcttgcttgcttgcttgcttggctggttggttggttggttgcttggttggttggttgcttgcttgcttggttgcttgcttcattggttgcttggttgcttgcttcattggttgcttggttgcttgcttcgttgcttgcttggttggttgcttggttggttgcttggttggttggttggttggttgcttgattggttgcttggttgcttggttggttggttggttggttgtttggttgcttggttggttggttggttggttgcttggttggttggttggttgcttgcttgctttgttgcttgcttggttcgttggttcgttggttggttggttggttggttggttggttggttggttggttcgttgattgcttggttggttggttgcttggttggttggctggttcattggttggttggttgcttggttgtttggttggttggttttcttcacattttaacagtaagttttcttattcttcacttttatgagcattttactttattattatcatctgaggtttctaacacagggcacaagttttacaaatccaaatcataactaataggtagaaaagtctataaaatgtgaaaaatacaaatgtaacacacacgcacactacaatttattttattattccaaatttcaaaaatagttttaaaaattgaattccagctacttcaacaaatatgcttccactagcttagagaacagcagaaaacaagttgaaaatcttcttttatacctctaatagagccgcaaattaatttaaacagcaacttaatgtattttcaaataggccttcacactttcttactgaaaatagagcataagaaacaaagacaaagtgtattccaattacttaggaaaaattattagctccagggatactttagaataatgtgtttaaaactgttttgtctggagacttaatgtatagcatggtgactatagttaattacaatgtatagtacacttgaaatttgccaaaagagtagatcgtaattattctcaccatacacacacatacacaaaaaggtaattataaatacattcattaatttgattgtggtaagcatcttacaatgtttaggtatttcaagtcattacattctacaccttaaatatattcaattttacttgtcaattatacctcaataaagcagggggcaacacaaataaattttttaaatttagcgtgcaaaaatatttttaaacagtttcaaagctgagtccacagtgttgattttacttgcacaaaatatttctgcaatatttatcctatcatttggttcactccaggcctgccctagaaacctgtcacactttcagttcaggacctacagactcattgcaaccagccggttgtctctgctgccatgaggggaggtcccaagtcatcaaaggggacactctatccctaaggtcagctgtaaccttccataagactgtcttcttgttattatgaaacataactaaggcctggcatggtggctcaacgcctgtaattccagcactttaggaggccaatgcgagtggatcacctgaggccaggagttcaagaccagcctgaccaacatgttgaaactccgtctctactaaaattacaaaaattagctgggcgtggtggcaggtgcctgtaatctcagctactcgggaggctgaggcacaagaattgcatgaacccaggaggctgagattgaagtgagccaagatcatgccattgcactccagcctgggtgacagagccagactctgtctcaaaaagaagaagaaggagaaggagaaggagaagaggaagaggaagaggaagaggaggaagaggaagaagaagaagaagaagacataactaaagtttgctgtgttgggcgtcactaatttttaacttgtgatggaagatgtttggaattataagagcaggtggcgaatcagcccattgggctaccttggctaagtctggtagtttgtttacagtcatcatttccctgattggaaaacacaaaagctttgagttccaggaccttcccttcaagcttgggcattacaagaggccaattactaaaagttgacatagctttgttgttattacagtaggtacaaacctgcaagtagttatggtttacgaaaataataaatggagaggagactctccccttgtttaaatttcggaggttaggccaggtgtggtggctcacacccgtaatgccagcacttcgggaggccaaggcaggtgaatcacttgaggtcaggagttcaagaccagcctggccaacaaggtgaaaccccatctctgctaaaaacacaaaattagccaggcatggtggtgcatgcctgtaatcccagctacttgggaagctgaggcaggaaaatcatttgaacccgggaggcggaggttgcagtgaccagaaatggcaccattccactctagcctgggcgactagagcaaaactccatctcgaataaataaataaattcagaggttaatggcttgactcttagcatagacacacagatgttacgctatagattataccaggaagaggtgggaggagccacacatcccacatcagaaatagcctttggaaaactgcaaactggattgcgtgtgcgtttggctgcaaaataaatcatgagtttctcccaaacattagatggacaaaggaacaattcactttttttccccactgtgatccattcacaatggagtatattcctggaggattctaagatgtgttttgttcactagagaagactttttaggagtgtttagtttaggaaatgcttagctggctatagaagacaggcgcacattcttatctgactacagaatccaggtgtcacctgtggagttaacacaaggccacagatggccgccttcaaggtgaccctgcccagagcctagggaacaaggtgagggttgactgagaagggaaatggtggtcctgctgagaaggacattccccaagctcatggtctggtccacaagccatcggtcacacagagggtcacacagatatgggatgcccagttaaattttaatttctgataaacaatgaatttgtttagtataaataaatatgtcgtaaatattgtatgggacatactaaaaacattacaatataatttagtacatgtactatgtactagtatatgtactaaattttatatatgtgtattttaatattaaaagttaggccaggcacggtgctcacgcctgtaatcccagcattttgggaggccgaggcggccggatcacctgaggtcaggagttcaagaccagcctggccaacatggcgaaaccctgtctctactaaaaatacaaaaattagctgggtatggtggcaggtgcctgtaatcccagctactcaggaggctgaggcaagagaatctcttgaaccagggaggcggaggatgcagtgagccgagatcgcaccacggcactccagcctgggcaacagagtgagattctgtctcaaaacaaaaaaaaaaaggaaaaagaaaaagaaaaaaagttagtatgttatacccaacacatattcaaggttgatctgaaattcaaatgcaactaggtatcttgtatttttgctaaatgtggcaaccctcgcacacagcgattcgctagtggctttggagggcagaggaggtagttccctgagccctccacgtgacttttccttctgtcctccccttctctgctcagaggccccttcctgggagaaggcttcgctgatcactctgtataccactgcacccttttcccacactcccggcccccttagcctgccttttcctccataacttatcattggatgacatactacatactttgagtaaatgatttttttcatctttattctcagccctttgtattatgtctgccacagagtgggccttaaaaaatatttgtggaactgcatgaatgagagtgactccatggacaaggataaaacactgaaagtaaaataaaggcagaactaaggtaaatgagtattgccatttcgactcacctgatagatctgtgtgttttagtcagtgcaaaactcacctggcgaagggaacaccaatgaataagatgacgattaggtaggtccaaggtggggcccaagattctgtagccctaccacgttcccaggtgatgccgatgtagcaaagagagtccttgaagagaggcagggcacggtgctcacgcctgtaatcccagcactttgggaggctgaggcaggcagatagtttgaagccagaagtttgagaccagcctgggcaacatggtgaaatccagtctctaccaaaaaatacaaaagtttatcaggcattgtagcatacacctgtaatcctagctactcaggaggctgaggcacgagaatcacttgaacccaggaggcggaggttgcagtgagccaagatcacaccactgtactccagcctgggtgacagagcaagactccaactcaaaaaagaaaaaaaaaaaaagaaagaaaaagaaaaagagagagagagagaatcattgaagaaagcttggatccaggtaaaaataaagagcaggacacaaccagaaaagtctgtggttctgttatatcattggacagtgtaatgaaatgtaatgtgttttaaaaaataaaaattctatattcctaaatcttgaatagattcctatttcagaaaccatccattctgatgagtctcccttagctctgaaagaaagaggataaaaaccaaatacaagaataataaaaaccacctgtccaagatgaactggagaaagggtgctaatctccctgcgacaactcctacaactgtatttgatcaggatgataagaaaagttttaactcatgcctcaagcagagccacaagacctgccttttttgatgaccttgaattctacaacacaggctccaaacctcacatcttgtcaactctcaccatgagaaaagtaggaaacactctctcacgttcccaagtactcaccataccccccaaaataagtaaaagcttactttaaaaaataatttgttttcagagcagaaatcttctaaaagttgaattctgattccgtacacacctgcggagaggtacttgccatgcccactgtctaatatgcttctctttctatgaactagggtaggggttacaaatagctgccatagagttactgtcattatcagcctgcaatctgtgagcagctgttaaaaacccacattttgtctcaattgtaatcattcaaacaaataatgcttacctacagttcaaaagaagtcagtctggaattaagtgctgttcataccaattatgtttcttctttcagatgtatggaaagggaaaataaattatccattaaattgcagatatatgtaaagatgctttttgtagtaaaagccaaaacaacttgaatctgacctgtgattagaaataacagacatttgaaattcagtaacttaattcattgacaatatcaccaggttagttatcaatgattcattcagttttcttttaagcattattaattgcttgataccatttaggatcaggaaacccttagtgcagtgaaaattgtaaaagtttatgacctgggaggcccgtgtctagccatgcctctgtcaggaatctgtggtgtgacttctgacaagagttttatccctctggatctgtttccttggctggaaagtgaggaaatcgatccaaagattacctcgcagattctctccaactctgacattctatcatttcacactcactttaaaatagactgtcggcgaccctacgccagttttccttgagaaacagcgccaccttcaggtcataataaccataagagagctgaccgtgaaggtgcttctccggcaggagcgatttgccctgatccacagaaacccttcccccgcagtcctctgggatgcggtcacacacttgtgagtctgccgctgggttaagatcaatgcgtatggacatggagccaagctgagctaactggcccacaagggacagatgcatgaccttggcctaattatcacagctccagctaacagttcgcccacagcaaagctccttgtggaaccctataaagaaggaaaggaagcgagggatatgctggatgaactaaactctacaaaacaatgaaaatggacacacctcttcttcaggcaattccacttaagatagtttccagctgttcttattttagcaagatatctacttggatatactttcattaagaaaaatgacatagtgaactctgaagtaaatatcagatttttttcacccagcaaatatttattgagcaaccaaccacttgaatgccagcaccgtgctaaaagctctcacaaaattacttttattgaatttccacaacagcccttgtgagagaggaattcatatcttcatttttcaacacaaggaagttgagaatgagagaggcccagaaacagcagatctggcaacaagcttgaatatgcagacacaaacattccacacagtcctcctctgaggacacgacgcaactgctccttttcaagagcttatcacttggcacagtgtggcaccaactgcaatcagcagtgcagaggcaaaggccgctagggaactcagtttatttctctgcagtgtgatctgtatgcagaaaatggccctatctttgccagccatcctctgccatacctccctaacccactgatggatgctgggcaggataagggggataagttaatttgttcctaagtgtctaaacaaggatccttcttagaaacagtggatatttaaggttgtccctttgatcacatcccaacaatccctaaattccataggctttcttggttgggaaagaggcagagcaactgctacccatgggaatgcatcatatttggaaatataatgtttcctgtgcattacagaggagagaagtgggaagcatcgcccggtgctggaggtactccagctacaggtggtaccctctatatcttactctttcccgtacctacatatgtgtagtcaactccagttgatgagatcaggttttcaattctttgtacccccccactgcactttgcaaaatactggcacataaatttaaagttactaaatatttgctggtgtgttaggaaaaacacatagtctgcatgcagaaaacaggaattatacaaactagcatgatcagacatatttaagatgtcagctgagttactctagggcagagcccaaggatgaagcttggctgagggaggataggggaagtgccttgggacctttagattatgggtggaaggaacaaaagacccacatggaacaagacactagagttggattgaccctttggggaaggagaagttacgatatgacatctaaaccgcaaggaagatgccagaaaaagaaagaataatatattgtgtaagcaagcaatttcttaattttaaacgtgtttttatattcaggtgaaattgttttattcaaggttgaatgactactaagttgcagctaatcagaagttgagaaagaaatgcttggcagttggaatccagtttttgcacataatcagaaccagtactgtcagtttcatggcgtctcaaaagctaagactgagaaggaaaaagggaacagagccggccttgtcacaccacagacgggagcagaagtgcagaactgtccccatggcatgtgttcaaaagagtatcgtgtagcaaaccctaaccacagcagcagtggctgagctaatcctggctggatcccagtaaggcccttctcgagtcccagcaatgacgatggtagattagcaatctcttctcaatgtgtcaatatcatctatgtttctaccctgctagcctcctcttttccttctttctaccccaccctcaattaaccatgcctcctcttacaatttctagtctgcaagagactaggacaatagagaatcaaaaactagggtagaaacacagaggctgctgtggttagcgcttgctgcgtgatagataggtttggttttgtagcaataacacaaggcggaaagtgatagaaaattcaacattctaactgcaattcaccaaatcttatctccagacttgcggtgtttatagtttcagcaacacaacctgactgccaggaggagagtgaggataatagcatgaatccgactgacaaggaatatgtcttggagagccgtgaaccataccaggaagagattttttgcttataagagcatatttgtttgtgggctctttccaggagcaatagactaagttgaagatgttttataaaaagatagttttatagaacagatattaggaaactatttttttatgatgacacacggatcttcagccttgagactgtatcttccagcctggttgatccttctgcactggttggtacacagtcacttccctgaatgtccccatctcaatcctccccacactaccctgtccactgagtcccaccccaggaccatccccagcccagcctcacagtccagcatccacagggttaatggcagacacagtagagagccgcaacagttgctaaatattgtcaatatcaaccctgattacaggcgatcgattctacaaagaactctacaaagattctacattctttattctatatagattctgtaaaagaagaatctaagcactttgttctgcaccgtccaaacatgagtcattgttttcagggcatcatttggcttttaacacaaagacccagcagagggagccgtttcctaacatgaaaggagctataggccctgctaagacagcaactgttattagtattattccactagagctgccatagaggggtgacgtcaacaacagaaatgtattttctcacagttctggagactggaagtctgaaatcaaggtgtcagcagaattggttccttctgagatctctcttcttggctcatagatggcggatttctgagtcttcacatggtcacccctctgtgtctgtgtcctaatctcctcttcctattaggacatcagttatatcagattaaagccccctctccccatgacctcgttttaccttaattaccttcctaaaggccctttctccaaatgcagccacattctgagaggtactgggggataggacttcaacatatagatatttgggcttcaatatatatatatatatgaatcctatcccccagaggcactgagggataagacttctatatatagtagcctttcaaacatgtatacatttcaaaatgtttttctgttgttttctataggttagattgcccattgtgttgactcccataataagtcaatggtttaaagtctttgtcctaccaccacattggcacacatccatggtgtgctcagatgggaagaaattcagacctgagtccctgccttcagcagatcctgcaagttcacatatctagatatagaaggaagtcttgaagatagacacatgcagggtggctggcagccatctgcagaggccaccaaatggagaatggcaaatgttaaggacaagatagtggagccattccagacatctttgaaaccagtcttatagactctcctccctctgattcccccctctcctgtcccaactttacacacccaaggcctggcagttctgctgattggctagcctggatttgcacagagaacaactcactggaccagatgtgcttcatcaaccccacggttagacaatagcattctgactacagtggcgcatcctcagcctccccaggcaaacagattcttgtcccatacatcccttacttacagccttggagctgggatgatggcggttacccttatcatgctaactggcttatagacccactacagacctcaccctgctgtctcaaaatgtaatctacccatatctgaagggttgtcttaaggatgcatgaatgtatctaaataattatcaatgatgcttgtttgcaataaagtgattatcttgctctacaatcactttattgcaaacaaacatcattagaaaaatattgttataaccttctttacaaaatcatgtataagagatttcatgcaaaatagaccatgaccactgccattatagtagatgggacccagaaagaacagccctttgcttaaagtaggattctatgtgcactcactttaccataagattactgtgacttgctgagtgtaccaggatgttagaggtgtaatttaatttctcaaagagattgaaagccagtgcctgggttcaaaaggcgaggaggcttgctcctttcttttcttttccttttttttttattattttcttttcttttttgaatagggtctcgctctgtcacccaggctggagtatagtggcacgatcatggctcactgcagcctcaacctcccgggctcaaatgatccttccacctcagcctcccgagtagctgggactacaggtgcacaccaccatgccaggctaatttttaaatttttttgtagagacccccaggggtctccctatgttgcccaggctggcctcaaactcttgggctcaagccatcctcccgcctcagcctccctaagtgctgggattacaggcgtgagccacaactcctggccaatgcaaagctttccacacccctctgggttgggggataggggcaggtctaatgaaacagcaggtagttctgaattaacactgaatctctcagccattgattcgagactgcagaagtcagcaggggcctttccctttggagatggaagtgccattggctcagcccctttaatatacgacccaagatgtcaactcatggaccctgcatcctgtctttggatctccccatttacactattgtaacctcaggacttcttcaagtctgccagaggaatccactcacacaaaagaagcactgtgggctccttggaaagtatggtagagaggcagggtggggtgtggctcagtaattacggcacatactccacagcaaatgacctcacaatagtgctttggcatttctgttccccacacccctttcccgatgccctccctcagggggcagaagtttgtgctctctctgtctctctccctctctcctttgccacccagtgcccaccctcactgcagccctctcctaacccctcaatcccacaccccacgctgcctctaacccactcagtgccatggtgggcatctatctgtagggaactccagctccctccagcccctatgccacctgtcatttccaatcctttctagcagctcccctgaaccctctctttaataagatctaccctttttaaaaatcatattttaattgtaattttaagtttcaaaatgtccattctcttaacaatcttaaccaattctcattgaatgccttctgcattgtggtcacaaaaggggctctggaaccagacgttggggttagaatcctggattcgccacttactgtgtgactttgggcaagttatttaacctctctgggcctctattttcttgtccacaatatagggaaggtgataatagtagctgactcttagggttggtgtgagagaatgagtcactgaattcgtggctggaaggcacgaacagcggtgcccagcatggagcgagttcagtaatgttagatgccaccgtgtggaggcaccagagggacccaataaacacacacagagggacaagcaaacccgcagtaccgggtcgcaatgtcacgatggtggaaatgcagggtactgtgggctttattggagggtcacctaacccacactggggtgtgagatcgcatcaccaaccccaacagactcggggctgtgttggggtggggggtgccgaagttctagcctcggggtcaagccacttctgatcacaatccaattcacccacatcacacacaccatggcacacacatcatacacacacatacacaccatgcaaacatcacatacacacataacacacaaataccacatccaccacccacacagcacacacacataccacataccccacagccccccgacaataacaccatatgcacaccacacacatacacacacacacacacacacacacacaaaacaggtcactacttccctcctatgtactatgtgccctgctattttctattctgttccatttcatgccatttcttcttagtaggactcactgaattgatttcaggacccactaataggcctgagcaggggttcagaaaacactgacttggagggaggcaaaggaaacccttaaacgtctgtgaaatggagctttgacctgtggtctgcccttgacctctaagtggggtaagcctcacactaggggtgccctgtcctgagacatagccatagcagtaggccaccttactattgggctgccctggccaagaatgggagaagcagagcctcgtcaccagctgggacaagggcagcccgaggagagaccctttcacagtgtcggcacagctccgtttgacctaagaagtaacctcactggtttttgtttctaatcaccccttcatttcacaatggcctgcaggtttcttttgccgccttctaaaatcaatgttttccaaagtacagctgagtcatgacacatcaaattagtgagtctcagacaacattttttaaaaaagaaaaagaaaggcatgggataggataggataggataaagtagagcatgtggcacaaggataagtgctgatgtgggtgtgggtgtgtgtgtgtgtgtgtgtgtgtctgtgtgttgggcttcaactttcttcaactgtcaaccctgctattaataggtgaagctataaacacagggcaaaatccatcatatctggtgattcatacacagaagtacagagtggagcaacttgagacattacaggctgaaaaatacacacttgaagtccacagcccatgactgaatctgctagatgatgactcggtggttgctgaggaatttaatcatctggaccatgtccttccctagttaattttcaacccagatgatcatatctcctgttccgggcagacacatttctggcgctaagaccagggcccctattcagccttagtggataattcaacctcctgagaggcactgcagaagcacctgggccaagattgctttcctcttctacgcctatcccaggaatgtggccactgctcaaaatgtgggaattcccttccagaattccccttgaagctgctgcacgcttcttagaccacgtctgagcaatgcctgcatcactagaatatttggcctcagttgggtttgtttctttaaaaaaaaaaaaaaaaaaaaaaaaaaaaaaaaaaaggttttttcctcaactaagacttaagacaagggggtcttaatttgattatttttttctgttttatatgatttctatgaaaactacaacaaaataaagttaattctatttaagtgactttttaatgaattgcctttgttagaaaaaaaattaagtgtttttgtctcactctgtcacccaggctggagcacagtggtgtgatcatggcttactgcagccatgacctcccgggctcaggtgatcctcccacctcagcttcccaaatagatgggactacagttgtgtgccacaacgcctggctaatttttgtatttttttgtagagacagggtctcaccaggttgcccaggctgatcttgaactccttggctcaagcgatccacccacctcagcctccctgagtgctgggattacaggcatgagccagcgcacccagccagaattacatttttttaaatggtactgtcctagaaaatccaggatgtgcagtgatcacgtatgaatgcatggacctgcacacacaggagtgaacaaaagacccacccctgccaggtcaccactcatatctcaccccagcccacgctagctcacactcctccccacacaccactgacctcatcattgctaggtacccacttgacttctcaacaggttcaagacaattggccttcctcgtctcttctagaaacaccctcttttctgggctttgtgtaacacctggtctttctcccctctctggccacttctcagcttttctttttctttctttcttttttttttttttttttttgccacttcctcttcctctacatcaagcttgtccaacccacagcccaggacagctttgaatgcagcctaacacaaattcgtaagctttcttaaaacattatgagatgtgtgtgtgtgtgtgtgtgtgtgtgtgtgtgtgtgtgtgtgtgtgtgtttagctcatcagctatcgttattgttagtgtattttatgtgtggcccaagacatttcttcttccagtgtggcccagggaagccaaaagattggacacccctgctctacaacatctcaatataggcctttttcatgtttcattctagattctctctctagactacaagttcttaaggggaagtggcattgggaaatgtgtgaaggtggctttggttgtcacaacagcagcgtggatgctgtgttactagtgttcagtggatggcggcagagggaccaaacagaaggcagtatcaccaaagaactgtccatcctcgcatgccaatacccacactccatagagaaacactgcaatggcatccactcccacagattcggttaccatttgccagccaaggcctgcccagccagacctctcgtctgagcactggtattccccttagacatctaacaggcacatcagagtcaacgtgtccaaagccaactcatcatcttctctgtaaatctgcttcttctccaagatgtccttcctctatgctcaccatcaccatgaagccaggtatttaagcaaagggagtcatctatataaagccaatcctccgtattcatgggggattgtttccaggcccccagggataccaaaatccacagatgcccaagccccttgtattaggttggtgcaaaaatattgcagtttttgcctttttcgtctttatggcaaaaaccgcaatgacttttgcaccaacccaatacaaaatggcatagtatttgcatataacttatgcacacctccagtatactttttttttttttttgagatggagtcttgctctgttgccaggctggagtgcagtggcacaatctcggctcactgcagtctccacctcccgggttcaagtgattctcctgtctcagcctcccaagtagctgggattacaggcgtgcatcaccacacccagctaatttttgtgtttttagtagagacagggtttcaccatgttggccagaatggtctcaatctcctgacctcgtgatccgcccgcctcggcctctcaaagtgctggaattacaggcatgagccactgcgcccagcctagtatactttaaatcagccctagattacttataatacctaatacaatgtagatactatgtaaatagttgttatgctatatttttaatttgtattatttttattcttgtattgttttatcggggctttctttccaaatttttttgatcagcagttggttgatcctcagatgtggaaccaacggatatcgagggcagactgtacttgcctctccctccacacccaacctaatcaccaaatcctaccaatccagctcctaaattctgcaacacccatccacttttcttcccctccactgccagcacgctaatcttggccactgtcatctccacctgaactcctgcagtagcccctcccgggtctccctgctttcattcctgcctgtttcagagcccccatcctcactgcaacacgtcatcttcaaaacagctgctctgatcctatcactctggcttaaactccccagtggcttcccattcctctcagactacagcccaaatccttagccctgcctctgaggacagccctgcagcgtctcccggagccttcctttccagcgtcacttccccttactttggccacgttgacctcctgccagttcctcaatggctctgttccccttccaccaccccaccttaatgaatgcccttccctctgcctgagaggttcctccccacctgcccttccctcccatggccgatgcctaacactcttccatcgctcttccaacactcttccccatcggttcaacactgcttcttccaggaagcctccccaggcccctggataaatccctgtgcattctcaaagtgcttagactgtctcttttctagaactgaccacaaatgtcatgaattacctagttgcaaaagtatttaatgtccatcttcactgctctgtaagcagccctgtggacaaggaatgagccagcctcattgactatgggtgctgcggctcccagcacagtgtcttgcaaacggacattcagtaaatatctagtgccaattcccctaagataaaccttggaggaactataaagagagaactgacaaaattttgagaaaatccatgggatgtgtcaggagggaaacagctgggaaagggccaggggactttggccaggagcaggatcagtgggtggctgtggaaagggtaaaacagaaaaggaactatgggtgtctgcccttgccccttccctcaccaatgctagggacaaacagtgcctgcccctaccctgatgatgacttagacctgtgtccagatgtcccaggagtaaaattcaggcatctcacaagtcctgtgcctgtgaggagctggaaaaaacaggtgggaagaaaaaccctaggcagttgcttccttctctaacaccaccccttccaaaccctcaggccaggggaactgagaaccaaaaagtgcccctttctaaaccactcctccctggggaccaaagatggagcactgacctgaaacattgttttgctgggtgtggagtaactgagggtggcgcagttgtctgggactgatctgtccccaccccatctctccatagatattgcctaacagagaagccaactgacctcgccactgccatggagaatgaggtcaagatagcaagatagttgagaagtaaaccatttaaaaaaaattgaattatagattccatcagaagaggaaatgttggaaaagtccaagaagttaaaattagcctaataagcttaataggaaataaagagaaatgaaacaatactaagacaacattaaaaaggaaccacgcataagaaataaaaaatatagtagttgaaggaaagaactcacaaatgtgactaaacagtagaatgaataaaactcaaggacaaattagtgagttggaagttcaaactgaggaagttcttcaaatgagggacaaaaaatagaaaatattagagaaaagccaaaaaaatggagtatttacatacaaatgctaacatccatatgataaggctcagagagtcagaggaataaaatgaaaagaaggaagtatttgaaagaataatgaagctagatttcctagaattcaaaaagaaaaaaagaaatacctcagaatgaaagggcctacagaatgacaaagagaagaaagagaaaaatatatcacaccctatggtaaaatatgagactatgaaagacaaagaaaattctgcagagtaaatcatacaaaggaccaacatcgagaatgacaccagatttccccacagcatcagtggatccaggaaaacaatggagcagtatcagcaaagtactgaaggatatgaccttagaacctagaaatatacatccagccaaactgccctttaattaagtatcagggcatgaaacaaatattctcagtcatataagacctcaaaacttgaataagtagagaaacaaatcaaagagttgctggagaaacaaataaaaataatcaaataccttacaaaagttggttgtagtaaacaacaaatttttaaaattctaagaccaggctgggtgtggtggctcatgcctataatcccagcacttatggaggccaaggcaggagaatcgcttgaggccaggagtttgagaccaccctggccaacatggcaaaacctcatctctactaaaaatacaaaaattagctggatgtggtggtgtgcacctgtagtcccagctactcaggaggctgaggcatgagaatcactgaaacccaggagatggaggttgcagtgagccgagatcaagccactccactccaacctgtgtgacagagcgagactctgatttaaaaaaaaaaaaaaattctaagaccaatgaacaagaaaaaagagacttacacttgcctggacttaaaagtatagatcaggaatatttgtatcataatgttaaattatataaaattagatttactatatataattgtctaaatcagaatacctttgagagtaaaaggtattatttaagaattatatcaggaaaagacagagtaaactaggactgtctcaggcaaatcaggacgtatggtcagtcatagtatataaaatagatcagaaaatatgaaggatgaggagggcccccaaaatgataaaaagtttaattcccctagtatatataaagcaaaaattgatagaaatatacagataaattgataaatccaccttcacaatgggagattttagcatatcattgtaaataatgggtcaagtaaacaaaaaaactcagcaggaatgtaaaagatttgaacttcacccaatgaatacagaaagttatgcctcgaaaacttaaatgatacatttttaggccaggtgcggtggctcacgcctgtaatcccagcactttgagaggccgaggcggggaatcatgaggtcaggaaatcgagaccatcctggctaacacggtgaaaccccgtctctactgaaaatacaaaaaattagccaggcaaggtggcgggtgcctgtagtcccagctactcgggaggctgaagcaggagaatggcatgaacctgggagggggagcttgcggtgagccgagatcatgccactgcgctccagcctgggagacagagcgagactccgtctcaaaaaaaaaaaaaaaaggaaaagaaaaaaaattcacatatcttatgatataacaatttcactctaagaattatacctaaaatgcttgcacacatacaagaatgttcatagcaccacagttctcaataaccaaaaactggaaacaactcaactgctcatcaagaaaagggagaagaataaactatggttgtattcattttctattgctacgtaacaaatgacaaacgtagcggcttgaaacagcacccatttattatctcagttctataggtcagatgtctggacatgtcatggctgggttctctactcaggggcccaccaggctgaaattaaggtgttggcagggctgcaatctcatctgaaggtgagggccctcttcccagctcactggttgttggcagaattgagttcctagagggtgaaggagtgagtctccaccatcttgctagctgtcagctggagccattctcagcttctagaggttgctggccccatggtgttttccacgacatgaaagttatcttctgcaaggctggcaggagattttcactgctactttggatgtctgacttgcctgcctctgactctagacccaggtttaaagtgttcatgtgattagatcaagctcccttccttgatctaatcaaggaagggcattaattatgtctgcaaattatgaagggcattaattatgtctgcaaaacccatcacagtagcacctagattcaagtttgaacactgtatgttccccagggcccagaatcttggcagccatcttcaaattctgtgtcctacaatgatctattcacacagtgaaatattacacagcagtcaggtagagtggatgatagctgccttcaacaaaaggatgaggcttggcaatttgatatatagaaaatatagacccaaaagactgtaaatttaaaacaactaaaattttaaaagtacatttaaggaacacatatagaaaatataaagcaatataaaaaagaaaggaaggagaggaactggattctgaattcattgcccagatttgggggaagcaggaggaggggtctgtgggttcatagatgccattatactatttaaaataactaatgaataactaactaaattaaagcaggagaaatatggaccaatgagaagagaatgtcatgaatgaatgcttatgatttttcctattctgtgcacctgatgtctaacaatgaagaagttcggcctcgatggctcatacctgtaatcccagcactctgggaggccaacgggggtggatcacttgagcccaggagtttgagaccagcctgagcaacatggcaaaaccgtgtctctacaaaaaatacagaaaaattagctgggcatggtggggtgcacctgcagtcccagctactggggaggctgagtgggaggaccacttgagcctgagagtttgaggctgcagtgacctgtggttgcaccactgcactccagcgtgggcaacagagcaagattctgtctaaaaaaaaaaaaaaaaaaagattaggaaaacaaaaaagattaaaaagatttgagaaatgaaagaacatattatggaattacaaaatgtgttccctccagggccggcgaagcagcctggttttcagatagcaccaaagaagcgccaagggatttgtctcctcaggtcaaacctctctccctggaaaacttccaaaatgtaaatcgaaattattatttgttcttggagaagcctagtcagaaaatactaaggataatcaggtggcactgtcacccctgagacctcagtcggcctcttactcctgtttcctccacccccgcccaggcaccactagttcctttgcagcagcatttaaaaacactcagtggcgcactgtgggaggcggaggcaggatgatcacttcagcccaggaattagaatccagcctgggcaacatagtgagacccggtgtctattcaaaaaaaaaattcttttaattataaaaatagaaaaataaacacactcaagactttcccatttaggggagaaaaaaaaagaaagaatgaagcaggacccctctcctcccccacatctgcctccagctgcaacatatctcccttccttgccttcctagcaaacttgtcaataacaagtcctctacattcttgtctcgtctcctccccattgtgcaaaacctgcactcaaccaagtcaccagtgacttgttcagcacttaatccctcctgatatctcagtgaccttggactctgtcagccacttcctcccagaaccctttgtcttcgcagctgtgatggcgctctggtggcttttctataatctctctgctccttttctgtctcgtctgctcgctgttgcctgtagctctgccctcacatcctgtttcctttctccaatctctctggaatagttcatctgcactcacaggaccaactgttgccagacactgctggtctccagatccattctcgcagtctaaatcgtcttcattctggacatatggaagcagccgcctccaggaaacctctgcaatgcccttagcaattccacctctctgtgccttcagttgaatgaatcatttctttcaccctcagcatgctgcttcttgttgtatactatattagggttctccagagaaacagaaccaatgaggtatgtgtgtagagggagagagaaggggagagagggagaaggagaggaaaactgattggttttaaggagttgactcataagattgtgggggctggcaagtctgaaacttgcaggccaggccagcaggctggagacccaggggaaggttgatgttgcagcttgagtctgaaggcagctagaaacagaattccctcttgctcagggacttcagtcttttctcctgaggctgatctgatgaggccaggccctattatggaggataatctgctttattcatggtacgtgttttcacatctttaaaataccttcacagcaacatctaggctggtgcctgaccaaacaactgggtactgtggcccagcaaaattaacacatgaaattaaccatcacacataccatcttagaaaatggttccaccgtctaacagatgccttaatccaggatcctgggagtttgcctcagttccttatatgacccaaacttcacacagccaatctagcaccaaattttatgtactcctcttcctcaacatttctcatccactcccactgcctcctagtccagggctctattacatctgaactgctacaagagtatcctcgctgcactcaagtttccagtcttactttctccagatctttcctagacacagcaaaagagagagaaagcttgttaacttgtgaatcagatcatgttgaatttcctacatcatctggattcctcgcaaatgccacagctgtcacacagtctggtacaggtgggatctctcattgactcagacatcatgagtgttattggtatgtgattttccaaaatggagaagaactcgtggtaaatttctgaacaaaacagagtacaatcttctctcaatttacacagcagttacaattctggaaaatgcagtgatattaaaaccctactatctgagtctgcatggctgctataataaaataccatcaaatgggtggcttaagcagcagaaatttctttctcacagttctggaggcttggagggcaagatcaagagttggttattggtgagggctctcttcctggcttgtggatggccgtcttcttgccgtgtccttacttgtagggacagtgagaattctctcctgtcccttcttataagggcactaatctcactgtgagggctccatcttcatgatcatgacttagtcacctcccaaaggttcaaccttcaaataccatcacatcaggtgctaggaccttaacatatgaatttgaggggtcacgattcagaaagtatggtaaaatgtaaaacagagttaggttctaagctcaactcattagaaacatgttttgtttttgtttttgttttttacctacaaaaagatctaaccatggattcaagagtcttgaagagctcagaactactttcaacatgggagaccatcctgaaattacagaatatttagcatctctggcctctacccaccaagtgccagtagcacctgcccatcatcatgataaccaattctgatcccacaactttccacaatgtctcccgggggggtgaacataccccaccactggacttctaccactaaccccaacccacacatgtagctcaagcccaactttctaatcacatatctcagtcctttagccaggaatcccattttcctaccatggcactctctactccagagtcattcatcatgaaccctccccctaaagctttggcattcttactgaatgctgatttttgctgaacgcttattctttcttttttctttttctttctttctttttttttttttttttttgagatggagtcttactctgttgcccaggctggagtgcagtagcatgatctcagctcactgcagcctccacctcctgggttcaagcaattctcctgccttagcctccagagtagctgggacaggcatgcaccaccacatgggctaattttttgtatttttagtaaagacaaggtttcatcatgttggccaggctggtttcaaactcctgacctcaagtgatacgcctgcctcagcctcccaaaatgttgggattacaggtgcgagccaccatgcccaaccctgaatgcttattcttttgctgactttatcatcctcaccttttttccttcccaatttccagagccagtggaaattccttcatcactccccaatcagttaatcagaaacaaaataatccaatttgggctctgaactcgaggggttcagtaaatattgtttgcaaacaaatgtcatcctcacttttcctggctacacctgcctgagggatgaacaggaagaggtctgaacagcaacaaaatgattctggaaacattacttggttcttctctcacacccagagaaattattgaaatttcaagtgcaagttcgctccctgccagcatcatagatcattcgagtccccaaagtgtggtttggagctctccagaattgcacttttggcaggattccctacagcattcttctgtgagtttcctacagctctccctgtggggacactgattgcattctccctggggtgagtttggggaccatcgaagggtcctatacccaaaacctaagattgagtctaggcaccttcattagcccttaccagcctcatttgagcagcgtgcccactggggctactcccatagaagagcaggatctcctacaaatccatcaggtcctcatgcacagagatctcccagcagatggccatgggtcattgggagacccaagaaacttgagaaacagttgatgagacttgggttgttgttgtttttttatgaatctacatttctgtagtaactcactgaatgatattcaataatgtctatgcaaaattaactcattgccacaatctaaagcaagcttgagaaatggtctggacaccacaggactgtggcagccacagagccctggcaccttccctgtgagaaggctggtggggtgaggctgtgggcagaaccaagcccaagttagtgaccctagcttaaaaagagagtgaaagaggaagccaatgagcaattctgagaatcagaggtggagaaaccaggtcacgtgcatgtggttaagtcactgggtcaaagttgggtgtgctggaagctgttgcgtctttctcaatcttacaaagccaggagtttgccaaggctgcaatgccctattagtaaaggttgagcatccaaatcccaaatccaatatgctccataatctgaaactttttgagcactcagtggaactcctggagcattttggatttgagatgtttacattagagtcgctcaacctgtagcaacatgtagcagctgagcaggaagaagcagtccctccccactcatttccttccacctgcctggggtggctaaggagggcagctggagaaagacagaggctacatgtggtcaaactttagtctgcagtttctcagtcagagactcagtgagggaaccggcccccactgtcctcatatgtgcaaatttgaagttgacctcatagcttctcatgaacaatgccatctggaacctcagccagggcctcccaagaggaagccagagttgaatatttggcctcacaagcaaatgtgaccaatgagatgttcatgccagagtcagggctagattcggttcccctaatttggcactccttcccctgaccccctgggagactagaaagttgtaggggtatggattttgtgaagagaaggatcaaacccacattagtagtctctccagcccagagaaatgctttcactgagtcaccttccatcaggcagtctttgatacacaagagtattccatgtttaaaatgttctttctccacaaacctccttcgtgatcctctctccgcagataatattgccacatatttcctgttaagagcatgtaagcccaaaatatctgagacaggtctcggtaaatttcaaaagtttattttgccaaggttaaggacacacccatgacaaatccatgacacagcctcaggaggttctgacaacatgtgcccaaggtggtcagggcacagtttggatttatacattttagggagacatgagacatcaatcaatatgtgtaagatgtacattggtttggtccggaaagacgggacaactcaaggcgagaagggggcttccaggtcataggtaggtaagaaacaaacggttgcattattctgagtctctgatgagccttcactgaatacacaatttacacatgagtggagagtagaagaatagtctggcttagcaaaacaatagggcagaggaaacaatcagatattcatttgtctcacgtgagcagaggggcactttgagttctgtcctttgtccacacaaggaatttccttgtgggcaaagtgtgagagaagtatgtagctttttttttttttttttttaaatcattgttgctgtcttatttaggaatgaaataggaggcaggtttgcctgacacagttcccagcttgactttcccttggcttagtgattttggggttgttgaaagaaaaactttagctgaattaaatttaaaggagtttaattgagcaatgaatgattcactgcaaatcgggcaacccccagaatcacagcagattcagagagactccagcccctccacatggtgggaaaagtttgatggacagcaaaaaaaaaaaaaaaaaaaagtgacctacagaaaatggtagtgaggtacagaaacagctagattggttacagctcagtgtttgccttatttgaacatggttctgacagttggctacatctcattggccaaaattcagtgatcgacacaagtgtaggctacagtcagtttatacctcgacttgttatagttcacgatgtacagaaaaacctttaggccgaacttaaatatataagaagccagctttaggctaaacttgatttaactttcccagtgggtttcaagaccaaataagtaacttactttggtaataatgacatcaatgactacagttttggtcaatctctcaaaattgagaaaatgaccaaaaggggggaagtgttaaatcagttgggtccatcaatgatagcaaacattctgcacaaatgcaagatgttgataataggaaaactgacagcatgggctcagggtggggagtatggaactctccatacttttcactcaatttttctgtaaacctaaacctgctttagaaaagaaagtctattaatttcaaaatataaaaataaaaatatccacccttgccccgcaaggcctcctttggttcccagccattcttttgctcacttatacagcaaaacttccaaattggtttctctcacctccaatatttttttctcagccctctctctgtagtagtttcctactgcagctgtcacaaatgatcacaaccttagtggcttaaacaacacaagtttattatcctacagttctggaggtcagaagtcaaggtgctggcaaggctatgttccttttggaagcctcctgcattccttggttcatggcccctgacacttcatcttcaaagccagcagcacagcctctttcagtgtctggcctcctcttctgtccttccatcttctttctctgactctgattctcctgcctcccttttatgaagacctcgtgattactttgagcccacctggataatccaggatcacatccctatctcaatattcttcatttggtcaaatccgcaaaatccctttgaacatgtaagatattatattcacagatcctggggattaggaggtggacattttggggggccattgatcagccttccaccttctctaactggtctctcctgaaatagctcttttcagtaggttaccggcagcctctgggttgcaaaggcccagggtcactccctcatcttgcttgagccctcagccacattcagcaagagtgatctctcccttcttctcaagaaattctctcctcttggcttccatgacatccagtctccatgctcctgggtcccctggccttgcttctctactggatgtctaaacatggtcgtgacccagggccccaccctcagccctcttcatctgttctttaggtgaacccatacaaatgatggctccagctctatgctgatgattcacaagtttacatttccacctcacacttttccactgaggcctgaaattgtatatctctttgatgctgtctttatatgtcttcaatacctttttttttttttttttttttcagacagggtctcattctgtcacccaggctggagtgcagtggaacgatcacagctcattgcagcattgacctcccaggctcaggggattctcttgtgtcaggctcctgagtagctggtactacaaacatgcgccaccatgtctgggtaatttttaaatttttttaatagagacagagtttcactgtgttgtccaggctggcctaaaatttctggcctcaagtgatcctcctacctcagcctcccaaagtgctgggattacaggcatgaaccaacacaccctgccattgtcacttttagacaattataaacttcacagaaaagttgaactacagtacaaacaagttgttttctgagctatttcctggtgccccatcacccctaaagactttttgtgtgtatttcctacaaacaaggacattgtcctacctaactataataccaccatcaaagcagaaaattaactttgattcattaataccatctaatcctctgaccaccttcaagtttcacctgccatgtctgttatggtaaaaggatccagttcagaatcatgaatcacatgtagtggtcacgtatctagtttccttcagtcttgaatggttgcccagactttggccttcaagaccttgacacttatggagactacaggccagttatttcgtaggatgtctatgatcggcttccatggacatcctttccttccccccatgtaaaggcctccatagaaagtataagatggaagtatatatttgtgcatcatcaacatagagctggaacattaagccaccagttgcaggagtcacctaaagaacacacgaaggccgggcatggtggctcatgcctgtaatcccagcactttgggagtccgaggtgggtggatcacctgaggtcaggagttcaagactagcctgaccaacatggtgaaacctcatctctactaaaaatacaaaaattagctaggagtggtggcaggcacctgtagtcccagctactcgggaggctgaggcaggagaatcgcttgaacccaggaggtggaggttgcagtgagccaagatcgcaccattgaactccagcccaagcgacagagcaagactccatctcaaaaacaaaaacaaaaacaaaaaaatcagaaacaaaaaacagatgaagagggctgagggctgggccctgggccaatttggtatgcacctttggtggaagcatcacacatgaggtgctgccttgttttcatcacttcctgttgcatgatgcacagctctgctttgtctcattattgatgacgttcaattttaccatttaagatgacctcaccagggtttgccactgtaaaattattcttttcccctttgtaattaataagcatttttgtgatgagacactttgagactatataaatgtattgttcttcatcaaattttctatttattcagtatttaaaaaggaaaacacaggtgtaaactcccaatacgtagcttgtcttttcattatcttaacagtgtttttcacagagcagaactttttaatttaaataaaatccaatttttttttttatttcatggattgtgcttttggtgttggatctaaaagtcatcaccaaactcaaagacacctagattttcccctttgttatcttgtagaattttttgagttttgccttttacatttaggtctatgatccagttcaagttaatttttgtgaaaggtataaagatgtgtgtctcaatacatcttttcacatattcagttgttccagcaccatttgttggaaagataattctttctccattggattgtctttactgctttgtcaaagatcagtctactgtatttttatgggtctatttctgggctctctattctgtttcttaggtctatttgcttattttttcaccaataccatactgtcttgattattatagctttatagtaaatcctgaagtcagatagtatcagtcttccagctttattctacttcagcattatgttagctatctgggtcctttgtcttttcacataaacttgagaatcagtttgtcgctattcacaaaataacttgttgggattttggttgagattccattaaatgtatatcaaattgggaagaattaacattttaacactactgagtcttcctatccattaacatggactatccctctatttttttttgatcttttatttctttcattaacgttttatatttctcctcatacaaatcttctacgtattttgttagatttctctctctctctgtcactctgtgctagtgtaaatggtattgtacttttaatttcaaattctaattgttcattcttgatatataggaaagcaattgacttttgtatagtaatgttgtatcgtgcaaccttattaccatttaaaacactaactatttctaggagtgatttgtgagggttttttttttttaatcagttctttggaatttcctatgtagataattatgttatctgcaaatttaaaaagttttatttattctttcccaatctgtacatctttctttttcttatcttattgtattacctagtacttccagtacaatgttgataagactaatgaaatggatatccttgctttcctcctaatcttagggaagatgcatccagtttttcacaataaagcataatatcagctgtagggttttttgtagacattctttaacaagttgagaacattctctcttcctagtttgctcagagtttttatcacaaatgttagattttgtcaaatgctttatcttcatctattgataggtgatttttcttctttagcctgttgatatgatggattacattaattgattttcaaaggatgagccagccttgtgtaactagaataaatcttatttaatcatggcctataatttcttttatatatggttggatttggcttactaatattttgttgggaatttctgcgtctatgttcatgagagatattggtctatagttgtcctttcttgtattgtctttactggttttaccattagggtgatgctggcttcacagaataaactagaaagtgttccctctacttcaattttctagaagacataatagagaattgctataaattcttccttaaatatttggcagaattcaccagtacaatcatctgagcctagtgttttctttttggaaggttatcaattgttgattcagttctcttttttttttttttttttttttttgagtcagagtctcactcttattgcccaagcaggactgcaatggctaatttttgtgtttttggtagagacagtgtttcaccatgttggccaggctggtcttgaactcctgatctcaggtgatccgctggcctcagcctcccaaagtggtgggattacaggcatgagccaccacgtctggccttgattcagttctttaatagatataggactattttgactatctatttctccttgtgtgagttttgatagattgtgtctttcaagaaattagcccatttcatctaagttaataaatttgtgggcacgaaattgttcataatatttctttattatcctttgaatgtccataggattagtagtgatgacctctctttcatttctaatattggtaatttgtgtcttctctctcttttttttcttggttagcccacctagaggtctatgagttttactgatctttcaaagaatgagcttttggtttggttgattttctctattcattttctgttttcaatttctttgatttctgttttaatttttattaattcttttcttctgtttgttttaggttacattgatcttctttctctagtttcccaaggtagaagcttagtttttgattttaggtctgtgttctgtcaacaaaaagagtcaaactctgtaaaatatttgaagagatttattctgagcccaaatgtgagtgactaatggcccctaacatagccctcaagagatcccaagaacatgtgtccatggtggtcagggcacagcctagttttttttttttttttttttttttttttgagacggagtctcgctctgtcacccaggccggactgcggactgcagtggcgcaatctcggctcactgcaagctccgcttcccgggttcacgccattctcctgcctcagcctcccgaatagctgggactacaggcgcccgccaccgcgcccggctaattttttgtatttttagtagagacggggtttcaccttgttagccaggatggtctcgatctcctgacctcatgatccacccgcctcggcctcccaaagtgctgggattacaggcgtgagccaccgcgcccggcctcacagcctagttttatacattttagggagatatgagacatcactcagatatgtgttagatgtacattggttagatctggaagggtgggttaatccgaagtggggtgaggcttccaggtcacaggtagatttaaatattttctgattggcaatttgttgttattatcaatagaaaagaatgtctgggttacagtaagggattgtggacaccaaggttttatcacgcagatgaagcctccaagtagctggcttcagagaggatagattgtaaatgcttcttatcagacttaaggtctgtgttgatattaatgctggtcagcttttcctgaattccacaagggaagagggtataatgaggcatgtctgaccccacctttcatcatggcctgaacaaatttttcaggttaactttggaatgcccttggcagagaggacagatccattcagatggttggggggagggcaggggctgcttataactatattttttggtttacacttcttttcttgtgtattcatttaatgccatacattttcctctaagcactgctttcattttattccacaaattttgatgttttattttcatttttattcagttaaaatattccaattcttcctaagtcttcttctttgacccatgtgttatttacaagtttattgtttaatctccaaatattttgggactttttctagctatctgttattgatttcaagtttaattccataagatctaatagtatattttgtgtgatttctattctttcaaatttgttagcatgagttttatggcccagaatgtggtctattttaattaatgtttcacaagaacttgagaatgggtattctgctgctgttagatgacatattctataaatgccagttagatcaaattaattgatggtgctggtcatctcaactatatccttactgattctctccctgctggctcaatctgtcaattactgataaacagatattgaaaactccaactgtaatgatggatttgtctatttctccttgcagttctattaatttttgcatcatatatttagacactttggagttgggtgcatatacactaaggactgttatgctttcttggaaagccgactttcttatcattatataattgtcttttaccccagataattttctttgttccgaaatctgcttgcctgaaattaatacagctactccagctttcttttgattaatgttagaatgtcatatatttctccatttttcttcttttttttttgaaactggatctgcctctgttgcccagcctggagtgcagtggcacaatcatagctcactacagccttgaactcctgggctcaagtgatcctcccacctcaatctcctgagtaactaggactacaggcacctgccactacacccagctaaaatttttttgttttttgtttttttggttttactatgttggtcaggttggcatttttaaaaatgtaatctatcagtgtctctatatttaaagtgggtttctggtagacaatatatagttggcccttgatttatttttaaatccactctattagtctctgtcttttaattggtacacttagaccattcacttaaatatactattgatagttagattaatatctcccatatttgtaactgttttctattcaatgcacttgttctttttatgtttattgttgttgctgttattgtttttcttccttctctttttctgccttctctgttgttgttgtttttttgttttttttttttcttttgagacggagtctggctctgtccccaggctggagtgcagtggcacgatcttggctcactacaagctctgcctcctgggttcacaccattctcctgcctcagcctcctgagtagctggcactacaggcacctgccaccacgcctggctaattttttgtatgtttagtggagacagggtttcaccatggtagccaggatggtcttgatctcctgacctcgtgatccgccccctcggcctcccaaagtgctgggattacaggtgtgagccaccatgcccagcccttctctggttttaattgaatattttatatgattccattctcccctcacttagcacattaattgtattagtcaggattctctagagggacagaactaataggacagatgtatatatgaaagggagtttattgggagaattgattcacatgatcacaaggtgaagtcccacgatcagccatctgcaagttgaggagccggaaagccagtccaagtcccaaaagctcaaagtagggaagccaacagtgcagccttcagtctgtggccaaaggcctgagagcccctggcagatcactggagtgaagtccaagagtctaaaagccgaagaacttggaatttgatgtttgagggcaggaaacatccagcatgggagaaagatggaggccagaagacttagccagtctagcctttcccccttcttctgcctgtttttatcctggccatgctggcagctgattagatggtgcccacccagattgagggtgggtctgcctttcccagtccactgactcaaatgttaatctcctttgacaacaccctcacagacacacccaggaacaatactttgcatctttcaattcaatcaagttgaaactcactattaaccatcacattaattatacttctttttaacaaatctttagtgactgccctagagtttgcaatatacattataactaatctaagtccattttcaaataacaatacactaattcatgggtagtacacaagtatcttagaaaagagtatccccaatttctccctctcaacccttataacattgttattatacatttcacttattcataagctataatcaaccaatatgttgctgctattattatttggacaattattctcaacctgataaagaacatctacagaatccctacagctactcacagaactcaggaaagcactttacttactattaccggtttatataaaagatacaattcaggaacagccaagtggaagagatacctaggacaaggtatgggagaaaggggcactgagcttccatgccgtctctaagtgtaccaacctcccagaactttaatgtgttaaccaacccagaaactcttcaaactctgttggttgttcaggggttatttatggaggttacatcatgtaggcatgattgatcattaactcagtctctagtccctctctccttcctggaggttggggtggagggggtagggccaaaagttccaggctttattgattattgggcttggtctttttggtgaccagcctccatctaaaagctatccaggggctcaccaagagtagcctcattgctgggcgcggtggctcacgcctgtaatcccagcactttgggaggccgaggcgggcagatcatgaggtcaggagattgagaccatcctggctaacatggtgaaaccccgtctctacaaaaatacaaaaaaaaaaaaaaaaaattagctgggtgtggtggcgggtgcctgtagtcccagctacttgggaggctgaggcaggagaatggtgtgaacccgggaggtggagcttgcagtgagccgagatcgcgcagctgcacttcagcctgggaaaaagagcgagactcggtctcaaaacaaaaacaaaaacaaaaacagtagcctcgttataacgcctatcacccctattactcaggaaattgcaggggatttaggagctctaggcaggaaccagaccatatatttttctatgaaaaaacaaaacccttagcatagcgatcatcatgattttaaattcctagtctgatttgcaaattctctgccatctccgagtcttatttctaagcttgctttgtctcttccaattgtgcttggtgttgtctgcctttcagcatgccttgtaattcgttgttaaaaactagatataacatatcaggtcatgggagctgagataaatggccctttaggataaggtgttaggtttatctggctaagagttaggctgtgttaaatgtttgctgtagttgtaggtgtcagaggcttcagttttatttagtgtcctcatttttgtctcctccattgtctttgggttttcctagaaatgccttcttaaatggagttgtaatccaccgttattatactacagagtcctgttgatgtggtggtaagatactgtggaggcaaaacattctacaatcttatgattaattcccagagttttctttaatgggcctgagtctctgggctatgaccctccgagaagtttcttaacttttgcttttttcctccagtcatgatagacaggaaggctagagggggctgagttgtctaattgcccttctgctaggtcagtttaggctccagtaatgtaattgccctgaggacaggtttttgttacagaacactctgggcatatctcaaaatgtttacttttcccctcccaccggccagtcaggaatttttctgtggtctttaccatgagaacttggtagagcttcttggagtaaacctttaacaatttggggagcatccctctaagactgagtacccaacagtgtttaattctcaagctagtccacactcagtctccagcaattagtcaattacaatttaagttttgctatgatttcagaggcttctggtccctgtaaactgtgattctttgcatttgtctgtctttcagtttttgcagtttgccctgtgactcaattcactgatactgaaacaagaagagttgttaatcttcaatttgttcagcttttctcttgttgtggggagtggagtgacagctttcaagctcttcacaccttggcatagactgcatttgcttttgttttgttttgttttttgtttgtttgcttgttttgagacggagtctcgctctgtcgcccaggctggagtgcggtagcgcaatcttggctcacggcaagctccacctcctgggttaacgccattctctcgcctcagcctcctgagtagctggggctacaggcgcccgccaccacacctggctaatttttttttttttttttttttttttttggtatttttagtagagacggggtttcaccgtgttagccaggactgcatttgttttttaaaaaatctttttcctaattatataagtaaggatgtttactgtagaatgtttggaaaggaaacaaaataaaaatcacctactatcatccaatctgcaataagtcatagttaaggttttgacatagttttatttttaatatatatgtttatataaaagagtgcatgcagcacatggagtttggtattggatttctcccattttcagaggctatttctgcaaattctctaaaactgtggctgaaaatattttcaatgttgaatgtcttttataagaaataggatcctagataagttcccttcagatcgtatggggctggtgggaattctgccaagggtcacataagaggcaggaccgtgacatcctctttatgatcacccttgtgcctagccttaaaggagtatcagcaaatgttggttgacttcatagattaaaaggctcatttttcccatctacaaaaagtatgaaacatcctcctcctccctttcctaggaggccagaaagctgaacgagagattaaatactcagttaaaacaatttaggtggttagtgtatcttttccctctccttcaaaaagatattaacatttccattttagtagctgtaatgtttagaatatacatacattttacttgaaagctgcctcatagtctattttggttttggattttcttttttttttcgtttttcttgagacagagtttcgctcttgtctcccaggctggagtgcaatggtgcaatctcaactcactgcaacctccacctcccaggttcaagcaattctcctgcctcaggctcccaagtaactgggattacaggcgcccgccaccacgcccagctaatttttgtatttttagtacagacagggtttcaccatgttggtcaggctgggtcttgaagtcctgacctcagatggtccatctgccttggcctcccaaagtgctgagataacaggtgtgagccaccgctcccggcctcatagtctattttagaagttgacaggctataaataacaagcagacaaattaatgaagaacatctgtctttctgcctatcccgaaacacgttgatcagtggggggtcgagggaagggtaggagtatggagaagagacccgcggagaagaggggagaatctacaacggataatgttgtagatatttacaacatttactcaatggtaggtatttttatcctcgttttactagttggagaattatatcatgcaggtttatacaattaacaagtgggggagccaggagagaacccattcactctttagttcattcattcattcagtcagtcaacacatctttgggtgtcttctaaatgccaggcactattctaacccctaaggatacttcagtaaacaaaacagtcccaaattcttcccctatggagctttctcggcgaaggcgggattggttaggagctgacaatcggcagcagacgattgtaaatgaccggaccttttttctattctcctgcccagcccccggcccggcctccgcctccggccctgctccagccccgccagcggcccaggacccgcccctggctccggccccgcccctggctccgcccccgcccccgcgccggcggcggcgcggcgcccgcgcttccgtatcgctcctcgtaggccggggctcggcgcgcgcacccgcactaaagacgcttcttcccggcgggtaggaatcccgccggcgagccgaacagttccccgagcgcagcccgcggaccaccacccggccgcacgggccgcttttgtcccccgcccgccgcttctgtccgagaggccgcccgcgaggcgcatcctgaccgcgagcgtcgggtcccagagccgggcgcggctggggcccgaggctagcatctctcgggagccgcaaggcgagagctgcaaaggtaacgcagcgtggcggggtcgcgggagcggagcgcgtggccagctgactggagggaaaacgccgcctccctgcagcggttcccggaatcccctccggttccctctcgctctccccgactcctcctcctcctcctgccctccctctgcgtcttgagtatgcggctagtgcgcccttcctctctcccggggccgcacctgcgaccccaggacccctcccgggccctgtcctgcgccctccacgcgtcgcccctgctgggagtccgctttcgttgcacccctccgcgtcccaccccaccccaccaaggatgcccaggataccgggcatttgccactgcaagatgtgagtcgttgctaagtttgagggtcacattcctccaggtccaccccgccttgcaaaaccggctcaccagctgggtgctcaggttcgggatctccagcccgcccccttgaggtcccctgggattagcccccctcgacctgcgtcagggtcacagactgcagccggggctggagcggcctacacccctccggatccgctgcgtggaggcaggagggggaaggggcgaggggacgtggccgcggagacagaagggtgcaccctcccagggtcggagaggggagatactgggaagatactccgcgaatatggagaggcgatcggcacttgcatttcaaccctgagcaaatcaatccgttacacgcagtagcgagttgactccatcagcccgtttatttggttagcgatggttatattgactctgagtattcccacctcctttcttttaacatttttttttttatttccttgttttgtttagcaagaagtcttagaaacgaatatagcatgcttgggcgttgattcagtggtgagaagtgccggagctggctcagggagaggtggagtttcccatgtgtgctcactggcccaggggctaagtcccactgcttgccaaggtttctcagtatcctgtccacccaccccctatccacctgtgcaggcttgagggggtgagggggtagcagatactctatcaaaatctaccctaaggaaaatattcgataaacactcctagcaattagggcatagctgataaggcttgatctgtttgtcgcagaaaatgacttgaacttgtaagttctattgttcataaagttgttttccacaattttagataatcaaaaatgtacatgactcatttttcttacctattatttcctctaaagtttctcatgtatttattgaaaagttaaagaaaatctgattttggttcacataatttgacaatggtgatttgtctaaaagtcatttcaaaaagtagtatgaaaaggatcataaccctagaggtactgtcatagacgtgaaacatttattaaaatatatattccatggctcacacttgcacactcaaagccacattggactcattttttctgctacctttataaaccttcaaactgttcaagagtcaatggtatgtatcatcttccgttatcaatcatcatgttttgttttgtttggtttggtttggtttggtttggtttttgacaaagtctcgctctgtcgcgcaggctggagtgcagtggcactgtcttggctcactgcaacctccccctcctgggttcaagcgattcttctgcctcagcctcttgagtagctgagattacaggcgtgtgctactacgcctggctaattgtatttttagtagagatgggatttccactatgttacccagcctggtctggaacttctgacctcaaatgatccacctgctttggactcccaaagtgctagtattacaggctcaatcatcatgttttatcaaagctaaaacccaaactaaaatgccattgcttataagatgcactttcattttatgtaatgaagtaagaaaaaacactgtcaatcatgctatgccatgccaccagaatgaaagcattctgatttcagaaattctcaaatgttaaaagaaaatgggcattttataatttgtgaaatattagtgagttagagcagagcttgacggcactggccctgagggtccttcttcttcctttggaagaatgaaactgggggctatgcaattcagggaagaataaaggaaaaacaggtaattggcagaggaggttggctgacttagaggtatggaaaagacaaaacaaaggagggaaaaagagaggtatgtatgatggggaggagttcagagccactgaaaattttctctggccctaacaggaaaacgagttaccccacaagccagggttttatcatctggtacgtggagatatccatcagcattgtcattggttttcatttgtttgtttttaattctcaagtttaaaaaaaaatttaaaatttaaatgtgtctcaaccaccagaaactatagtgagatttctctgtaataaataggaaagaaggagactgatccagtccttgttaaaaaaaaaaaaaagaggaaactgaatcacaacatactttgcttttttcttttctcacaaaggaacagtgggccctttatgctgggtgaaggtgagtgagatgggggaaggttcactgggcaccaaccttctgggctagagaaattgcccaggctttacagaacaagctggaatcagataaagttgtggaaaggaagtcgaggtttcactctgccatatcagtaggaggtactaaagccaaactagtagcagcaaagtgaacagaaatggtaagggggaaaaataggaaaggaaagaacaacgtggattgcaagacgtcttactaaaaacaaagaattacacttggaacagaagaaattcattaccattgccttacactgtgcaacaacttgataaaaatataaatccaataaaacaaactcaaagatgagaaaattgtaaactggagatgaaaagggagattgcagacctaaaggaaaattgaagaccgtaaaaacatagtgacagaataaataagtcaggagaaagaacagaagcaatactgctgaaaataaaagtattttaatagaagaaagcccagtaaggaagcccagtaaattcaactgaaaagggacaaagattaagaagaaagaagctattatgaaagacaaaatacaatcaagaattgggaccactgaagtcccagatgtagagaagtcaacaaatgggacagaaaattcaaataaaaataagtccaaagaaagcttattgagatgaagaaaaaatggtctgtaggccaaaggaacatgccatgttccagaaaatgtcatgtgggaatacggaagcactacgatatcttaaactatttaaattcaaagaaaaagatttaggaatctaagaagaaaaagtaaaggagggaaaaacaaaatcaagctcgcctcagacttcagtgcagcactaaatgccagactatgatggttgtgaggaaacagttccaagggaaagaaacttttccgaggggcatattttttttccggaagaacaaagggaattcagcacccatgaaccgtttttggaaaaacaaaaacttgctgagtaataaaatccaggaaatagcaaattaagagataaatcaaaataaagaacttaagagtagagaaaggtaaaaagacttggtgagtatttattctatttaaatatagaagtaatacatctatagaaattgtgggtaagatagaatgcgattgttattaatctagacaaaaatatacagccaaaaaaaaaagaagtcagagaggaagatggaaggaaacatgagaataccaatattctcttctttcaaagaatggaatagtaaatatggtataaaattaaaagatgctatgtgaatatataatactgcaacttttaatatctttcataagttttatttaaaaccttagagggatatcataggaaattatactttcttatggacaaaaaaatttaaattttaacaactcctttgactttattttagtcttttcccaagtaacattaaacagaaacactgtgtgtgtgtgtgtgtgtgtgtgtgtgtgtgtgtgtgtgtttatgcatagaaagatctgtgggattatgttcgcctaatattaatgatagtaatagtttttacagaagaaaaaagaaagatgtttgaaaaataagctagaatcaaatatgccaagatgttaacaattgttgatgctggatggtaggaataaggatgagtgttactttcttatttgtactttttcatatttttctaatttccagaaaaagatatgtaattgtttttgtctaacatttctgaatccacttcattcattattcattgcctccttgacaatgtgcatcagtctatgtcaaacagaaggaaagacacagccatactttaccaggagactatgaggcagcgagttcctggagggttgtttgtctgtctaggaggagttggaattcaaagaatcacttcactcaatccatccattttatctgggccttgaaaattggcagggtttgtctggtctcagggtgaatagcaggtagagctcttctttcagaatggagaaggccacagtgtcacagggtgaacctgtgacaaaattggggttcagcctgggaagccacatgagttgttggcttcgcacaggatggaattaaagagcaagctgacagaattaagtgaaagcaagtttattaagaaagtcaaggaatgaaagggtggctactccataggcagagcagcagcatgggctgctccactaagtatacttatggttatttcttgatcatatgctaaacaagtggtggattattcataagttgtctgcaaaaggggtgggagttctggaactgagggttcctcacttttttcgatgatatagggtaacttctgcatgttgccatggcatttgtaaactgtggtggcactggtgggagtttcctttagcatgctaatatattgtaattagcatatgataagcagtgaggacagttttgtcaccatcttggttttggcaggctttggccagcttctttactgcgtcctgtcttatcagcagggtctttgtgacctcctgttttatcacataactaagaatgcctaaccccctgggaatgcagcccagcaggtctcagcctcattttacccagctgctactcaagatggagtcactctggttccaacacctctgacaagagcagggggtgacctgtcacctggggctcagcaggacaataactctaggaaaaactggaaaggctgatagccttgaatttaacctaaggagcttggtgcattgtcaggcaacagtgagctacagactgagctcactacataattcacagggcccacccagagccaaataaaaatgcctgagaaagtaccactaaaggtactaaaatataaagccttttcttccacagtctctctctctcaacacgtaatgtttttttgtttgctatttaatatcattctaagtaaaaaaataggccgggcatggtggctaacgcctgtaatcccagcactttgggaggccaagtcaggtggatcatgaggtcaggagatcgagaccatcctggctaacactgtgaaaccccgtctctactaaaaatacaaaaaattagctgggtgtggtggcgggcgcctgtagtcccagctactctggaggctcaggcaggagaatggagtgaactcggaaggcggagcttgcagtgagccaaagtttgcgccactgcactccagcctgggggacagagtgagactctgtctcaaaaaataaaataaaataaaaaataaaaataaaaacttgaattattagcatgaatattgcagttctttatattatgcaaaaccagatttaaataagagcatttaattcatatatggaattgccaagttataccattagtactttacagcacatcttgggaggttcccttgaactagccagaagaagcaaactgaagccagacagaggaagattgcaaagaggaagagagggtctccaccaggcacagagccacccaagggagccctccctcaggctcagggataccgagggagccagagcagattcacacaggtccctggggcccctctgccctggtgactctaggatgcatgtacttgcacctgacttctaggcatccccctcctgctagcttcccctcgatccagcctggggcaggctctgtggaagtcaagccttgcatctccctttcccaagcacctaccatcctaacccacagtgtagtggccacgtccaagggtctttacgtctctgcctcagatatgctaggtacctgggtcaagagtgacccagagactcatccctgccagacccaacctccagccagtcaccctctgactccagtccatggggcgaggctggagtgctggccctgacctctccagcatctgcaccaggagggcttcagcggaatgtggtcccagttgatgccccatgccaacagtagcagcagcagttgttaggcatagagattgaagccagacagggcctgggattcctctgctgggagcctaaactgcaggagatggggaaggatccaagtgtgagctggggctcctagcacaaaactcacattgaaagataaaatggttaagaatttcaggatagccacaggagaacctcaagccaagtgtaggatccttctagctgcagggcctgggggtactgagactagccctgttgacaggagccatgctttaggaagactgatctatttgtagtcagcaagagttttaaggagctccattaacaatttaggcacgatgccaagatgggatattatattttccaagcaagaagaatctggtaatcaggcatatggttccaagtgaagtataagtcaccagaaagcaaggaaggaagccatcccctggcccagagggggagaatggggtgtgtgtgtgtgtgtgtgtgtgtgtgtgtgttttctcggctgctgaagagactgagtgttcctgcagatatataacaaagatgaagatgtgccaccgttggagacaaatggggaccagaggccacatgtcagaggtcaggtcaggtgttcaaatataaaggggttgccctggctgggcatggtggctcacatccataatccaagccctttgtggggctgaggccggaggatcacttgagcccaagagttcaagaccagcctggacaacatagcaaagccccatctctaaaaaaaaaaatacaaaaattagccaggtgtagtggcaaatgcctgtagtcccagctacttgggaggctgaggtgggagaatcgcttgagcccaggaggcagaggttgcagtgagccgagatcacaccactgcactccagcctgggtgacagagtgagaccctgtctcaaaaaataaagaagttgcccttctacaatctggatgtggtggtatctaggggaatgttcacaactaggcaacgcctctgctgtggattgattatgggagatgacatcacacatcaagatatctcagcagatgtttctcaatgggtacagtattatgggattagttccaggcagtcgtgcttggatatctcatgggtggtggagtctgtagcaaggctggaaattttgacttggaatcacttggatttctctaagagaataccccaggttggatgtgttactgtggcagcagagaagacttaaaaattacattgtttttagcttgaacttcgtcttgtgaagtcctaattagggaagaggagtcaggctgggggtctaggggaaagcaaagagataaagcagataagccataggtctaccttgcttcatggtccaggacatacaaacaaaaagaagaagcagataagctataggtctgcctttctttatggcccaggacatacgaccctcctgcacacataactcacaatcttcctgcgtatcatcaaatgcttcaacttatcatcaaacatctcggctgaccgaaaaatgcaagttagctccctgctaccttggcgttgtcagtcctccacatagcactcttcagcttaaattgcattttataaaatccccagcaagcctttgtctcctggcagtcaactcgtctcttactgacctgcccattgctcccttgcaatgtattttcctactttctctaataaatctgcctttcttgacctaaactgtcatggtaaattcttcttactcctatgtcaccagccacagacagtcgccacaagccatgacaagtctgcgatttcatggtctttttttattttgatgatatttccccagtgtttgggggacagaagaatgcccacaatctataggtcttagtcacatggatggggacagaatatctgagagagagagaaggaacaagatctactggggctccttaaaattcttcttgaagaactcctttctcaccttggagtagggaagactttctgattatgactcaaaatttagaagctaagaaagaaaatacctttaaatctgaaaacataaaactcaaaaacttctgggtgtttttttgggggggttgttttttttaaacagcacaagcaactcaaagggcaagtgacaaactggggagagaagaaaaagatgtgactcatatcacagtttcccttctacttaaaaaaaaaaaaaactgcaaaccagtaagaaaatagcaacagctcaacagaaaaattgccaaaggcacgaacagttaatgagaaggagatgcaaatcgctcttaaacctatgaaaagatgaaggtgttccatcacaaagagtaagagaaatacaaattaatattaatgtgaaagacaacttttcatttatgaatttgagaaaaatccaagaacttgatgatatacctctaagaagcaacggtagggaaacgaaaattctcacacattgcaggtggttatgtaaattggtatagccccgcgggtggtcagtgtgacagtttctatccaaattacagatgcatagtttcattgccaggtctcttctgtctgcttcttcagacccaccctcccctctccccactgtttagttggcccaggaccctgtctggtaaggatacaactccaggccccttgccctatggcttctggttgtgttcagccgatggggagccccaaataagagaaggaagggacaccgtgagtgatatttatccctcagcttcctgcctgcactgtcctcttggtctggctgtgtccagtggtctcatgtcatagctgctcatacaggagtttctccttacaaattgcaatgttggcttctcttccccctccggcccagagtgattacagccatcaatgttgtgagctacaggttctataccctcccttctgcaggcccagaatggtaacagccctcaatgttgtgagctgcaggttctgtactctccctcctggggcccagagtggtcacagccctcaatgttgtgagctacaggttctatactctcctttctgcaggcccagagtggtgacagccctcaatgttgtgagctacagctctcaatgttgtgagctacaggttctataccctccattctgcagacccagaatgttacagccctcaatgttgtgatctgcaggttctgtactctccctcctggggcccagagtggtcacagccctcaatgttgtgagctacaggttctatattctcccttctgcaggcccagagtggtcacagccctcaatgttgtgagctacaggttctatattctcccttctgcaggcccagagtggtcacagccctcaatgttgtgagctacaggttctatattctcccttctgcaggcccagagtggtcacagccctcaatgttgtgagctacaggttctatattctcccttctgcaggcccagagtggtcacagccctcaatgttgtgagctacaggttctggagtctcccttctgggccccagagtggtcacaggcctcaatgttgtgagctgcagattctatactctcccttctggtttgcctacagccctctcacacatttgtaaatatagtcctgcaacccctaatgatgtcttgggcaaagatggaccttttatatgacgatagccccataagattataccatatttctactgtaccttttctgtgtctaaatatgttcagatacacaaatgccactgtgttgcaactgcttacagtattcagcacagtaccatgctgcacagatttatagcctaggaacaatagtctataccatataacctagatgtgtagttggctatgctatctaggtttgtctaagtatactctgatgttcatacaacaaaatagcctaacaatgaatttctcagaacacagcactgttcacagttgcaaagatatggaatcaacctaagtatccatcaacaaatgattggataaagaaaatgtggctaggtgtggtgctcacatctgtaatcccagcactttgggaggccaaggcgagaatccaggagtttgagatcagcctgggcaacatagtgagaccctatctctacaaaaaaaaggtttttttaattagccggtgtgtgatgacacatacctgtagtctcagctacttagggggacaggtgggaggattgcttgagcctgggaggttgaggctgcagtgagccatgattgcaccactggcactccaggctaggcaacacagcaagacccgtctcaaaaaaaaaaaaaagttacatatatatacacacagtatattcagccataaaaaagaatgaaatcgtgtttttgcagcaacatggatggaactggaggccattatcttaagagaaacaactcagaaacagtcaataccacatgttcttataagtgggagctattaataaaaaatgtgcacacattgacatatatataatgtggaatgatagtcattactgactgagaagggtggattgggtgtggggagttaaggaatgagaaattacttaatgggtataatgtatactattcaggtgatggatacactaaaagcccaaatttcaccactatgcaatatatctatctaacaaaactgcacttgtaccccttaaatttatttttttaaaaagcgtgtatcctaatttgaatgagctgtttcttgccagaaccctaactgatatgtcctttgtctagcaattctacttctggaaattttcccacacttaaactggcacatgtgcaaaatgaaagagatttccttgcagaagagactggaaataattcaaatgtctatagtaggggtactaattatataaataatggtgtgtctatagagtagaactgtatccagctatttaaaaaacaaggatagaaagatcttccaaacatatttttaagtggaaaaagcagggtggaacagggactatacatgctatctcttgtctaaaagatggggaaattaggaatatgtatttgtttttgcttatgcatgaagatactctgaaggattcacaaaagaaaaaaaagttttctaaagggagcaagacttttcacaattttttttttgaatgcttaaaattgttgaacccaacgactgttgcctgttcaaaagttaaatttaaaattcctcccagactaggtaggggattgggcccagaagctgagaccaggctcacttgaataaatggggtaaatgactaggaattttactattccttacaggtctctcattatcttgtctttgctcccatttttatatttgcagtttaattagacacttcagaattttgatcacctaatgttgatttcagatgtaaaagtcaagagaagactctaaaaatagcaaagatgcttttgagccagaatgccttcatcttcagatcacttaatttggttctcatgggtaagtgctgctttttatcttagctcttatagaagcaagctgtgatgccatcctcactgagagcactggcaggaagtcgcaaactcatttccctgactagaggacccagtaccaccctgcctagtgtcaggagttaagtggaaagcaaataggaaacctacactagtagtttagattcaatgtagattcctgtcctgttgttaattttaggaaaacaaatgagtgacttaaggcaataataatcaggactatcctcgccataatttgaagagtaatttctcctaacacgctttcttcctccccaatctttgataaatgtcttttacctctaaagttgattaattagcaacatgcttattcatattctgtgaatatttctaggatggacaattgcctctgaggacattccctcagccagcccaagtacttaaacaaaaacaaggaaattctttgatgttaaagatctcgtgtgtgtccgggcgcggtggctcgcgcctgtaatccctgcactttgggaggccgaggcaggtggatcatgaggtcaggagatcgagaccatcctggctaacatggtgaaaccccgtctctactaaaaaatacaaaaaattaggcgggcgtggtggcgggcgcctgtagtcccagctacttgggaggctgaggcaggagaatggcatgaacctgggaggcggagcttgcagtgagccgagatcgagccgctgcactccagcctgacagagcaagactctgtctcaaaaaaaaaaaaaaaaaaaatctcgtgtgcgtgtgtgtgtgtgtgtgtgtgtgtgtgtgtgtgtgtgtgtgtgtgttttgaggcatagtttcactctgttgcccaggctggagtgcagggtgtgagctcagctcactgcagcctccacctcctgggttcaagcgattctcctgccttagcctcccaagtagacgggattacaggcacccgccaccatgcccggctaatttttgtatttttagtagagacaaggtttcaccatgttggccatgctggtctcacattgctgacctcaagtgatccaccgccttggcctcccagaatgctggggttacaggtatgagccactgtgtccagccattttttttttttttagacagagtctccctctgtcacccaggctggaatgcagtgagcgatctcacctcactgcagcctccgcctcctgggttcgagctattctcctgccttagcctcccaagtagttgggactgcaggtgtgcaccaccacacccagctaattttttgtatttttagtagagacagggttttgccgtgttggccaggctgatctcgaatcctgaccttgtgtgatccacccacctcggcctcccaaagtgctgggattacagacgtgagccacgacgcccggccccagatatatttttaagtggaaaaagcagggcagaacagggaccgtacatattgttgttagtgtcagctcccaaatggatcttattttatctcagatcacagtccttgcaccatgtgctgctggcaccaatgtagagtaaaaaccatctatgtgggcatttttttggcacaagaaaaatctcaatctgataccaataaatgtgtgttaaagaatgtcagacttagagtaatcattgcaagttgagcccagataaaactattgcctctctaatgtgttttcttccttctagtgtatatcagcctcgtgtttggtatttcatatgattcgcctggtaagagatgttttttggcttcactaaattttgtataagagtgaaagtgttggggcaaccattcagaggtataaaatgtgggagatttgatttctgattgtacatctgttgcctgttttattgggattctttctctgtaaaaggagctaaaatgagctaactctggttttttgagagatacaaaactagtctaagaaatgaacactagagatcatttttaaacttctttaaagaatattcaaactcttaataatctcactaataaaagaatgaggagacacagactgtgccaaataaaaaatggcccagaaatatttactctttaatttacattcttccaccctgatgattccagacaaaggacaataatttttttttaactaaacttcttcctacgtatataaatctgtccacaaaacttcactaagtattaaatatgtgtccaaccttgtgctaagtgttggttgggggtgaagagttggcagttgagaaacaaaggcctgagtcctaaccacaggaaacttcagtgatctttaaaaatttaaccgtataaggcagaatttggcaagtctggctttaatgtctcatttatcactgccacttcccacctacatgacattgtataattcaactcagtttcacagtctgtaaaatgaatcttttcatagtgcctacttcagcattgttgtggggcttaaatgcttagaaagggccagtctgggctcatgttatactcccctgctctctgtgatccagggaataagtgagctggggaatccagaggaaggaaaatttgcagcgggctgagctacttaaggaggacttcatggaggagctgggagcagagttgagagaacggcttggggagggagaatgggtaggggagagtgaaaggaagtgcatcatgtgggctgggatggcctgggttattttggtccagtgaaccatggagggacagtccaagggcatcggagaagcccttctgtccagactctccttacacagtgcacagtccctgtttcccatgcttgcctgccctgacaatatgttgctcgttaattgacttactaatttatttcccatgtcctgtagacttcctgttttcaagacaccagggctctctggagaggttatctgccagaggtgtgggttctagatcccaagaaatgactgaacagtggccagaatacaactgtgggttccaaatttcaatgccctttttcttcttctctttagattacacagatgaatcttgcactttcaagatatcattgcgaaatttccggtccatcttatcatgggaattaaaaaaccactccattgtaccaactcactatacattgctgtatacaatcatgaggttggtttgatatttcattttctcttggtaaacatattattgttctgttatatggggagaggtgatcttttctctctctctgtctctccctctcccttttcctatctacctctccttctctctgcgtttcttattcagagccttaaaaagccaaagacaaaacaccatcacacatccatttttaattcagttgaatactttaataatccaaatctattttgacaaagcttgtatgtgtcatcaaagccaatttctacaggtcagaacctcacatacaaaataattcttgtgtatgggttaggcaatgatttctctaattcagtcagtctgaatgtttaaaagtcctgttatctgaggacaggaatccaaaggtctattgaccatattgatggtttatgttcacttttctttactctggtgggacaccagaaagctgcctggcctagtctgggacaggcctgggtccatagtctggtttggtcactaaccagcttgacacttggcacggacctcagcccctaagctaatgcctctgctgaggggttgctgcaaggattcgtgacataatggatggagtcctgcttgtcttttgtcttcccacacctaccaatcgcccttagaagtcattgctttgatccagcagccccttggagtgtccttttgatggttatttatttggcctagagctgctgctgctactgcttattgactgagccagtgggagacctcttgtgagtttctcttcggtgcctgctaaaaagtttttctctgcattgagtggtcacatgtatcatccaactaactgaagcttggtagatgagatatctgcattgtccctgaaatagcccaggtctgacttaggactggatcatctagtcttagccagagagggagggggtctcagggaaggcattcataattgtcccatagaggaagggagatctgaggcttccaccatgagggcccaagtttcattcattcatttactcatccggcaattttttttttttttttgagacggagtctcactgtgtcaccaaggctggagtgcactggtacgatcttggctcactgcaagctccacctcccgggttcacgccattctcctgcctcagcctcccaagtagctgggactacaggcgcccgccaccacgcccagctaattttttgtatttttagtagagacggggtttcaccatgttagccaggatggtctcaatctcctgacctcgtgatccgcccgccttggcctcccaaagtgctgggattacagacgtgagccactgcacccggctcctccggcaagttttactgagcacctactacatgccagggggtccaactgtgaaccaaagtccctgccctcctggagcagacattatgtaaatggagacatcagtaaacaaaggtataatgtgacaggtgtgggtaaatgctacaatcaagaaaagagagggattgaaagtgcaggggtggggagggcataagatgttccattttcaataagatggttggggaagatcacttaatacaatgatatttgggcagagccctaaaggaaacaatgaagtaaggcgcccaaaaatagactctcattacatcaatgctaacaatttcctttttccatttttttctttccaaagtaaaccagaagatttgaaggtggttaagaactgtgcaaataccacaagatcattttgtgacctcacagatgagtggagaagcacacacgaggcctatgtcaccgtcctagaaggattcagcgggaacacaacgttgttcagttgctcacacaatttctggctggccatagacagtgagttttatctctgtttctccacttcgtccccatcatcaagatctttattatttgctattccatgaaataggaggtctacaaaggtgttttagacctggggctgggctcacctcttggccctgccacttcctagctctgtaaccgtggactgctttgcttctctgagccttggttttctaaatctgaaaagtggaatgataatttgtactttgcagatttgccccgtgcctgtataaggcagtaggaactgctgttttcggttttgcagcctgacaggaagtctggagccaggttcaggtgggctggatctagcgctctcatctctctggcccaggattttctttctttctttctttctttctttttttttttttttgagatggagtttcactctgtcacctaggctagagtgcagtggtgcgatcttcgctcactgcaacctccaccttccaggttcaagcgattctcccacctcagcctccagagtagctgggattacaagcacacaccaccatacctggctcattttttgtacttttagtagaaatgtttcaccatgttggccaggctagtctcgaactcctgacctcaagtgatccacccgcctcagcctgccaaggtgctgaggttacaagcatgagccaccacacctggccccagtgttttcttaatacagcaactccaccccctcattataacccaatgttcttttgtgtgtgaacaccaagtgtgcatgcacctagtacccaaagctcagaggagaagactagaccccaagaacaggcctaccccttctttctttccctgtgactcaagtcagttccctaacacactgtgttaacagccccagctgtgttactttttcaatttcccactttacaacgagtttccaagagaaccatctggtctcagcttcctgttgtaggctatgcgggtgtgcacgtgctcatacatgattagcaaagtggtaaggataactgaatccccctgtggcaaacaattcggatacgacatttgctggatttgtgtgcatgtttacgtatgtgtataaacagacatctgtgtgtacacacagaaaagaaagaaaatcagaatttatagttcatggtatttgggttgttaaagaatgcatattaaagtaacagtgagatatgtttcatggctcaaatgataaatatgaaaaatacataaatatccaggtttagagggaatacaaagagtgtgctttggcatggtccatctgaagtaattggcagcatgtattaaaaaccttaacatgtgcttactctaatccagaattctttagtaatttgtcccaaagaaattattaaggccaggcacagtggctcacacctgtaatcccagcactttgggaggcctagaccagtgtatcacttgagctcaggagttcaagaccagcccgagcaacatggggaaaccctatgtctacattaaaaaagaaagagagaaagaaagaaagttaggggggagggagggagggggggagagagagagagagaaagagaaaagaaagaaagaaattattaaggacaaatgcaaaaatttagttccaagaatatcccatgatacattaagtctttaataaaaatcagagacaatttaaatgttcaaaacagtgaatcagttaaatcatgatacagtcacttagtggaatagcattagcaatgaaaaattatgatgtaaatcaggacttggcagattttctatacagggccagagaagaaccactttagactttgtgggccacatatggtctctgtgacatattcctgtctgtttttgttttttgcacagtgtcttttgaaccaccagagtttgagattgttggttttaccaaccacattaatgtgatggtgaaatttccatctattgttgaggaagaattacagtttgatttatctctcgtcattgaagaacagtcagagggaattgttaagaaggtaagtggcttctcctgttaggatcaaaacagttctgagtgggcaatcaatgcacttgactgtctcttttgaaaggaaatttgcagttgaacaattaaagctaaaacgtcaggcttcagtatggtccgacttagggaagaagtcactatggttcattcactattgatctaaacctgcagcacagtgttctttaaaagaataagccacggctgggcctggtggctcacgcctataatcccagcactttgggaggccgaggcgggcagatcatctaaggtcaggagtttgagaccagcctggccaatatggtgaaaccccatctctactaaaaatacaaacattagctggatgtggtggcaggcatctgtaatcctagctactccggaggctgaggcaggataatcgcttgaacctaggaggcagaggttgcagtgagccgagatcgcaccattgtgttccagcctgggtgacagagcaagactccgtctcaaaaaaaaaaaaaaaaaaaaagagtaagccacatgcacaacatcaaggaacacacaggagagagggtgtgggagggagatgcagagtacagccaaatttcagtgaaccctggagagatttatttgaaaaggagagtttagctgagccacccgtgaaaagcatctgtcgctgcctctctggccctcacacacagtaaggaagtggcttatctggcaggttctgtcctctcctaatttctgcaaaggacctgactctcagtaacctcagggttatctggtatcagacagccctgcatcttcaatttttgttgtccctagccctccaaatgctggaataagtggaaatggacaaattgctctcaccggtgtagcagcagcttatgtctgtagagccctttgccaagtataaaacccttgcaagtgagaccagcctgagagataatcagggtagatgcatttcaggcggagggcacaggaagttcaaaggctctgaggctggagtgggcccggtgtatttcagcaacagcgaggagaggtggctgaactggagtgaccaggcaggagatgaagaggaggtgaggtcagagggtaaatgtggctggacctggtaggagtttgtgggtctgggtcttctgagtgtgatggaagcctgtggaacccaaggcttaacagagcatcctggctgggctgttaaaaatagaccacaggggcaaagatgggagttaggagaccaactaagacacaatccagggtggcagtcacttaagaggcagtaacaaattatatgattattatcatttttcttttaatatcgacatggattataatcagtactctaggaaaaggagcaaaaatgggtgaaaaataagtttatgtggcctaaggactatgtggagtgtcattaaatctgtttcaatcatgtctcgtttgtgttcaccccataagcaactaactctatgttttagattatgattcctaaaataagagactgttgcttattaggatattgactactctataagaggaaaaactgtagttaataggcatcttcttcataaggaaaattagcctttaaatccagaaaaaaaaataagctactagtataatctaagcaacagatggtggtggcttggaccttgatagtagaggggtaatgagtagtgagaggccatcaaattctgcatatattttgggttttgtttgtttgtttttgagatggagttttgctcttgttgcccaggctggactgaaatggcatgatcttggctcactgcaacctccgcctcccgggttcaagccattctcctgcctcagcctccctagtagctgggattacaggcacccgccagcacacccagataattttttgtatttttagtagagacagggtttcactgtgttggccaggctggtgttgaactcctgacctcaggcgatccacccacctcagcctcccaaagtgttgggattacaagcatgagccaccatgcccagctcataattctgcatatattttgcatgtggagcaagactaacttccccattaactatggaagatgatgaatgaagcaggtgagggttagatagggttagagggtttgggacatgttaaattccaggtgtccgtaaggaatctaggaggagacgtggggaaggagctggatgtgccagtctgttgtccaggagagaacccgcagctagagagagagcctgggagtcactggcttcttggtgcatgttgaatgccctaagaccagatgaggtcacctgggaatagacactcagagagaaaacaagacatccagtgacagagcccaggaacattccaaaatttggagatctggcaaatgaggaagaaacagcaaaatcgactgagaaagagcaaccagcatggtagggagagaagcaggtgagagtgatgtcccggtagctgagagaagaactttccagaaggtgaaagtggtctactgagtccagtgctgtaaatgggacaattgaagaggactgactattggatttagcaacattgtgtccttgataaaagtagttttaatagagttaggggcaaagagctggttggagtagattcaagaaagagtgggaggagaaaaattggagacagtgaagagagctcattcttccaaggaatttttccaaacagggaaggagattgtgtgctggccactggaggggaagcttttagtttgttgggtcgtaagtttgtttgtttactaactcctcctcccaaacagaaatttacagaaaaacatcattactgaaggctgtatttgagctgctaggaatcctcatttattaaactgctagtaagaatgtattttaaaaactgtaaaacatgatacaaaagttattattcatgaaagagccttcatatcatcttttaaattctgaagtgaaatgcaactacaggaaagaagaggcaaggtgtttaaagggagatggctgggcacagtggcttacgcctgtaatcccagcactttggaaggccaaggcaggcagatcgcttgcggtcaggagttcaagaccagcgtggccaacatggtgaaaccccatctctactaaaaatacaaaaattagccaggcatggtggcgggcatctgtaatcccagctactcaggagactgaggcaagagaatctcttgaacccaggaggtggaggttgcagtgagccaagatcatgccactgcactccagcctgggcaacagagtgagaccccatccatctatctatctatctatctatctatctatctatctatatctgtctattgataaagggagaagatgagaaactagacatcagtcagttttgtcacagacaagctctgtgaccttggagaagttacttagccacactgagctacagttttctcatccgttgaatggaggtaatgcctattttgcagactgttttgaaagtcaaaagggttaatgtttatgaaggcactttctcaagtgtaaagtagacacacactgtccatgagagaagataatcttgtaaaaatgacgtcacagagacttttattcctctttgaagacttttatctcatttgtaaaatgaaggcgctagactagatgtcatggttataaaatatgtgtgtgtgcaggtgtatattaaaagtgcatgtaggtgtagttttctgataaattacttgctccagatgacttataaatcctttttcttaccaagcctgtgataaatctaaccctgtttgagatttgaagacaaatcccaaaagagattaaggcctacctctaaatgaaattctcagtcttactgattttttgcttatgtttacagcataaacccgaaataaaaggaaacatgagtggaaatttcacctatatcattgacaagttaattccaaacacgaactactgtgtatctgtttatttagagcacagtgatgagcaagcagtaataaagtctcccttaaaatgcaccctccttccacctggccaggaatcaggtatgttcatttttttaaattcatgttttgagtattcatgcttttactctgagggcaagcctatttaaagaaaagaatctgaaaagaattcatggagcactaaaggtctttcttccagtaaacacctcacagagatgttttctgttggttcgtgtgtatgatctggtagagtcacttttatattgtcataccaaaaaacaatcagatactactcgatgagatcagaaatcttgaaatggaaacgcttttgtttcagggagtcaggattaaattcagcactgtgtgccctttgtgtggccattgctgaagccaaatgccagaagaggtggagttgcttgagacagtggtatacagtggcattaaggggtgaaaaggtggaagcagcgaggttgggtgcagttcatggatgtgatctggcatcagctctcgctcatagatgaaaggaacccttgccagggtgtacgagaaaatcactgatgaaggctgaacacctttctgttacacagacatcagaacaataaacagtgtgatcccaaaccttcttcccctttggagtgagaacaatcaagcctcggaactccctgctgattgttttctcaggaagtagccaagtttccacctgttttaccaaaagtgagaagctatgcaagtctccctcaaagaagcccttctaaatgtcccaaccgcagtgttaggggaaagaggtcccaatccataccccaagagagggttcttggatcttgcgcaagaaagaattcagagcgagtccgtaaagtgaaagcaagtttattaggaaagtaaaggagtaaagaatgactactctatagacagagcagccccgagggctgctggttgcccatttttatgattatttcttgatgatatgctaaacaaggggtggattattcatgcctcccctttttagaccatgtagggtaacttcctcacattgccatggcatttgtaaactcatggtgctggtgagagtgtggcagtgaggacgaccatcttggttttggtgggttttggccggctttactgccatctgttttatcagcaaggtctttaccaacggtatcttgtgccaaccccctatctcatcctgtaagttacaatgcctagactgtctgggaatgcagcccagtaggtcccagccccattttacccagctcaagatggagttgctctggctcaaatgcctctgacaccaatggaagtatctttaatgttctgatttaccagaataaaaataaggtaggatctataaagaaattactttagttgtaaaccaaaataaaattctaagccccccaaccaactgaatggatccctcctctcagccaagggccgagtaaagtaaagtaaacctgaaacactagttcaggccatgatgggagtgagtggtccagacgtgcctcacgggaccttcctacctttggaattcaggcacagctggccagcactaatattaaaacagaaaccttaagactgacaaaaagatgctttgtagcactaataccagcatgatggatagcaggccctaaaagaaaccaaagtgttttaccccaaaatacatttctttgacatattttgaaatggccctgcaaagctgtctcttgcagggaaaatctgctttctataaagaacccccttcccagtccaggtgttcttcctgatccaagagagaattcactaagagtctggcacttttttaagtccagtaagaaacatttacagtctgttctctctgaagcctgctaccagaggcttcatctgcgtaataggaaccgtggcctccgcaaccctttgtcttaacccagatgcttccttttattaattccaagtttttaatcagaaaatctttgaatctacctatgacctggaagcccccccacttcgaattgtcccacctttccagattgaaccagtgtacatcttacatgcattgattgatgccttatgtctccctaaaatgtataaaaccaagctgcaccctgaccaagggttctcgggatctcctggggctgtgtcatgggccattggtcactcatatttgactcagactgaatctcttcaagtatgttactgactttggctcttttcattgacaaagtgatatggtcacttgtgaatgaagtgagccacggaacgttgcctggcacataacggtgctctgtgttggcttcactacagggcaatatgatttgattctctagtgttcctcaagaccagatgatgcacaggctggttctaaaggaaaaaacatgtcaaacacctttagcgtaagttatttttatgtcagcaaatacaggcaaacttaaaactgcatatagattctgactatagctctttcaaaaatataaatccaaaataaatgtgcatgtctttgttctaacaccagctatctgacactaactagttgtccaatgattccattcatttctgatactaccccaggttagcacagaccccacaggttaaaggctcagtcccacaaaactgcctgcccccacttcagatgccagccacaagtcatgggtgacaaggttccctgcacttccacctgacttggctacaaattcaggagttcccatgacctccctttaggtttgataatttgctaaaatgactcacagaactcaggaaagtgttatggcttatgattaccattttattataaaggaattgatggacagccattgaagaggtgcacaggacaaggtctgaaagggtcccaagtgcaggagcttctgtccctggggagtcaggtgtaccaccctctctgtacattcatctgttcatgaatttggggactccccaacccttggtgttcacagtttgtattgggtttcattatgtatgtgtgattgattaaattactggctgcaggattgaactcagtctccagcccactcccctccttggatagaggtcaaatgggggagctggaagttccaaccgtctgatcatgtggttagtttttctagggaccagccctcatcctgaagctatccacaccctgccccatcacctcacaagcataaactcatatgtggcccctaaaagaggcttgttaacaaaagacactcctaacgttcaggaaattccacaggtttttgaagctctgctccaggaactagggacaaagactggatatatatgtatattttattatatcattgatcttacatacaaacgaaactcttatagacaataaaaactgaaattagtgacctggcagacagatggtggtttattgaaactcagtccccagttccaaggtgaatgtgttgctgatgagaaggcacaagctccttggaggttgatgaattctgtgatgactcactttctcccctgactcttttccatttcacctactaagatgttcatgtaacaacatcctctcaggtcattccatttttacttggcgtgaatgcgtcatgttgcacatcaagtcagccctcattctttgattattacccgagataggtcaagtaccgctctctttaattatccaaatactgtacctgatgtcaaattcttgtttgaaactcaggaagcaaataggttcagataacgtggcctctgtcactatctgcttgccatctgacgtgccctcaaccagccaaactcagaaaccagacaggtttggatggtgaggggtcttggaaggatagcctgagaccagcattaacataggctcagcagtaagcactgtgacccaatcctagggcagactgatatggggggattttagcccagacatctggagaaacaccttccccttgtcaagccttaaaactaatggtttgtctcttttattaatattaaggccctaaggaaaagctctattcattcatttgacaaatgtttattgggggcctgttatgagccagattcttttctggatattgaggatttagcagtgaacaaaacagattaaaaacttctcaccttgtggagcttacattgcagtaggagacagaataacaagatcaacatgtaaaatagacagtatgttaagtaagtaccatggaaaaaaattatgcgggaaaggaggtgagggggatgtcaggttgaggagagcaggttgctgtttttaataggatagtgtcttgatttgcatttgctagaagcagagcctgggatgtgaattcatattcaagtgtgatttattggtgggggcatcttaggagaaggggaaagagggaacaggtaggtacagggagagagaaattaagcaggcatgtggctctcagctgagcctgatcccaaggggttctcggaagcgtgaactgtatcctcaagtcagcagccagtcagttactggtggtgatctatggcatggcctccagatgaggcagcccccttttgggcaagggcagttccttatgtgtccggagttggttcctgccaatgggttcgtggtctcgctgacttcaagaatggagccgcagaccttcctggtgagcgttaacagctcttaaagatggcacagacccaaagagtgagcagtagcatggtttattgtgaagagcgaaaggacaaagctttcacaccctggaaggggacctgagcgggttgccactgctggctggaggtggccagcttttattcccttattgtcccttcccgtgttcgtttctgtcctatcagagtgcccttttttcagtcctcctcgtgattggctacttttaggatcctgctgattggtgcattttacagagcgctgattggtgcgttttagagtgctgattggtgcgttttacagaatgctgacttgtgcattttacaatcctcttgtgagacaggaaagtccctgattggtgcgttttacaatcctcttgtaagacaagaaagttccctaagtcctcactccacccaggaagtccagctggcctcacctttcacttagagaaggatcagctctgagagatatcagcagacacgtgcggcagcagtagtgggtgtgcactgactggaaaaggggacatgggcaggccacccacagcatccaccacagatggccacagatggccttcctgagaaggtagcatttgaataaagacccaagggagatgtggtaagcagaataatggcccccaaagatgtctacatcctaatcccagatatgtgaacaggctaacctctatgccaaaggggcttgtgggtgtgatgaaattgaagatcttggccaggcgcagtggctcatgcctgtaattccagcactttggggggccgagccaggtgaatcacctgaggtcaggagttcgagttcagcctagccaacgtggtaaaaccccatctctactaaaaatacaaaaattagccaggcgtggtggcatgcgtctggagtcccagctacttgggaggctgaggcaggagaatctcttgaacccgggaggtgggggttgcagtgagccaagatggtaccactgtactccagcctgagctacagagcaagactgtgtctcaacaaaaagagaagcaggagactcagaggcagagaaggagctctcacagcagcagcagaggtcgcagagtgaggatgaaggagggggccatgagcaaaggaatgcaagtggcctctagaagctgggaaaggcaaagaaatgggttttcccctagagcctccataaggagttcagtcctgccaacatcttgatattttttatcccagtgaaacccattttggatttctgatctccagaactattaatataatatatttatattgttttatgacactaactttgcatcatttgttacggtggcaatgggaaacaaacacaaggtgagggagtgagtcacgcaaacctatcaggggaaggagttccatatgcggggttcagcaagtgccaagtgcccgaggcaggatatgcctggcacggcacggcaggagtgaactgaacaagggaagaatagtaacagttctggtcagaaaagatggaggagcctgaatgacatagaacttagaagccgttgcaagagatggggaccctcagagggttgtgagcaggttgctctccgtgatctgacgtgggatgtaaagggaacatccatccacatgccttgaagtgggagccaggtgacccctgggctgattactgcagtcacccaggggagaggcggtcttacttgttccagagaggtaagtacgggaggaactataagagactgatgttagtcatcgccagtcttttcataaagttctttatcttttccattaaagatcattgtgatcagatattaccaaccccgttgctcagttcagccctctgcttgtgaggtttcttattttttgcttaaaatatctccacagtgaatccagagacagacaggtttgtccaaggccaaatttttaagacacgacctggtctctccttcccaagatgggttgatctggtccatctttcatgaagaagatagttaacagcagtaacattcaatcacagcttctcctttctgagtcagaacattgatgggattcatctcttttcaaatatgaatatttaaaaatagcatgcatgtataattgtcatgaccccaagtgagatttctattttttagattatcatcaagctgaaaacaaacaaaaattctaagttctcctaaagaattctcagactcatgagaataccccaaattgaggaatattatcctagcatattaactacaatttacacaatttggtttggacatagagtgcattgtagctgttatatgcaagttggatgggtacatgagtcacaatctctgtattatgccattccttcaccagtgaaatcactttggtttacagtacccctttcaagaatgtaaacgctatacatgtcagaattttgtatcctaaaggcgtgcctctgtggctagatctgattctggaactgtcattgatatgacaatccaatccttcacactcttgatggaggtgagagtggattcttgaaccctgtgctatctaacagtgtttttactgaactatcaagggtttttactgaacttctttctattcattccttaaccttctggaagacttagagtacataatccatttgatttccttttttctcccctctatctatttttgcctgaggctatagttcgaggattaatactaatgaagacctttctggaagtgcaagagagccttagtgatataactactgatttttcagtctggtcgcacttcaggaaaataactatggtcagtcaaaaagctgaaattttccaaaaggaattttgatgagaaactaaggggaactgttaatagagcaaggcaggttctgcagagccctgacttgtggccccagcgtggctaaagtccagcctcagaatgacccagttggttgttttcaagcaaactttccttccccacttcttcctgcccgcagcgcatgctaaccagtgtggctaccgaacgtttgagatgtgtttcatgtgactgagagaccgagctcttaattctgtttaattttaatcatttaaattcagccagctgcagccagtggctactccactgtacagtgcagttatagaacataaactgaaggaaattttacttttaaaagctaagtctattttattgtttaaaaaatgcacacttagataattctccagtctctggtatttctcaatataaaactgttttttcaaacctttggtttcttgatcatcttgtaacaccaggccaatgtacatttatttccatctgcaattgtttattgcattttttgaaataaagtcatttaatttttcatcaacagaatcagcagaatctgccaaaataggaggaataattactgtgtttttgatagcattggtcttgacaagcaccatagtgacactgaaatggattggttatatatgcttaagaaatagcctccccaaagtcttggtaggtagtttttttgttttgttttgttttttctatctttgttttttattttaacttaagaatttgtatttatataaatattttcacagaagaaaatctcattttctataaacaccaaaatgctttctcactctgagttcttttccatatctataaatgtatattttgcagggtttttgttttgtttttgtttttattatacttttaagttttagggtacatgtgcacagtgtgcaggttagttacatatatatacatgtgcagttgtaagtgtatctgtgcatctgtgcattttatgttttctttcctttttttttttttttttttttgagacagtctcactctgtcacccaggctggagtacagtggcgtgatctcagctgactgtaacctctgcctcctaggctcaagcaattctcgtgcctcagcctctcaagtagctgggactacaggcgtgtgctaccacacctggctaatttttgcatttttagtagagatggggttttgctatgttggccaggctggtcttgaactcctgacttcaagtgatccacctgccttggcctcccaaagttctgggattacaggtgtgagccactgcactcagcaatgttttgttttgttttgtttttatacttcatcacataatttataatgatcaggtagaatttcattattattaacataccatttttcatttaaccatttctcagctaaagggcatttggatttcttttccttttcttttctttggtgatgatgaatagtacaataaacatttttatatggatcgtctttttgttttggattatgtcagtggaacatatacacaaagtggatttatcctataaaaagatttaaaaaggactaggcacagtggctcacgcctgtaatctcagcactttgggaggctgaggcgggtggatcatttgagcccaggagtttgagaccagcctgggcaatataaggaaaccttgtcttagagaaaataaaaataaattagccaggcatgctggcacatgcctgtggtctcagctactcaggaggatgtggtgagaggattgcttgagcccaggaggtggaggctgcagtgagctgtgattgcgccactgcactccagcctcggttacagagtgagaccctagctctaaaaatatataaatatcttaaaaatataaagaagcagccaaaggagaggaagttaagaggagtaagtcagaacatagtctatgtggccagcagcctgcctggtttgaaaggcagctgctcccactcactagtcacaaaccttgagcaagtttcttaacttctgcacctcattttctcatctgtaaagtgggcataagaatagtaagcctggccaggcgcggtggccacgcctataaacccagcacttcgggaggccaaggcaggtagatcacgaggtcgggagttcaagaccagcctggccaacatggtgaaaccccttctctactaaaaatacaaaaatttgccgggcatagtggcgggcgcctgtaatcccagctactcaggaggctgaggcagagaattgcttgaacctgggaggtggaggttgcagtgagccaagaccgcactactgcactccagcctgggcaacagagcgagactcccgtctcaaaaaaaaaaaaaaaaaaaaatagtaagcatacctcatagagcagttgcaagggaaaggtaaattatatataaagcaccaagagtcatgcccagcatatagtaagcatggtgtaactgttagctgttattattgctgtcatcatcatcaactgcatcatcattcaatctcattaagtttattttttatttttttagaggcaaggtctcgctaagggctggaatgcagtggctattcacaggtgcagtcataatgcactacagtctgaaactcctgagctcaaacagtcgtcctgcctaagcttccccagtagctgggattacaagcgtgcatccctgtgccccagtgattaagttttattatgtagaaaataaagagcaaacagtacagctgatacggactctctctctctttttttttttttttaagaattttcataactttttagcctggccatttcctaacctgccaccgttggaagccatggatatggtggaggtcatttacatcaacagaaagaagaaagtgtgggattataattatgatgatgaaagtgatagcgatactgaggcagcgcccaggacaagtggcggtggctataccatgcatggactgactgtcaggcctctgggtcaggcctctgccacctctacagaatcccagttgatagacccggagtccgaggaggagcctgacctgcctgaggttgatgtggagctccccacgatgccaaaggacagccctcagcagttggaactcttgagtgggccctgtgagaggagaaagagtccactccaggacccttttcccgaagaggactacagctccacggaggggtctgggggcagaattaccttcaatgtggacttaaactctgtgtttttgagagttcttgatgacgaggacagtgacgacttagaagcccctctgatgctatcgtctcatctggaagagatggttgacccagaggatcctgataatgtgcaatcaaaccatttgctggccagcggggaagggacacagccaacctttcccagcccctcttcagagggcctgtggtccgaagatgctccatctgatcaaagtgacacttctgagtcagatgttgaccttggggatggttatataatgagatgactccaaaactattgaatgaacttggacagacaagcacctacagggttctttgtctctgcatcctaacttgctgccttatcgtctgcaagtgttctccaagggaaggaggaggaaactgtggtgttcctttcttccaggtgacatcacctatgcacattcccagtatggggaccatagtatcattcagtgcattgtttacatattcaaagtggtgcactttgaaggaagcacatgtgcacctttcctttacactaatgcacttaggatgtttctgcatcatgtctaccagggagcagggttccccacagtttcagaggtggtccaggaccctatgatatttctcttctttcgttcttttttttttttttttttgagacagagtctcgttctgtcgcccaagctggagcgcaatggtgtgatcttggctcactgcaacatccgcctcccaggttcaagtgattctcctgcctcagcctccctcgcaagtagctgggattacaggcgcctgccaccatgcctagcaaatttttgtatttttagtagagacaggattttaccatgttggccaggctggtctcaaactcctgacctcaagtgatctgccctcctcagcctcgtaaagtgctgggattacaggggtgagccgctgtgcctggctggccctgtgatatttctgtgaaataaattgggccagggtgggagcagggaaagaaaaggaaaatagtagcaagagctgcaaagcaggcaggaagggaggaggagagccaggtgagcagtggagagaaggggggccctgcacaaggaaacagggaagagccatcgaagtttcagtcggtgagccttgggcacctcacccatgtcacatcctgtctcctgcaattggaattccaccttgtccagccctccccagttaaagtggggaagacagactttaggatcacgtgtgtgactaatacagaaaggaaacatggcgtcggggagagggataaaacctgaatgccatattttaagttaaaaaaaaaaaaagcaaacacaaagatgcttcaagatcttcaggagaagtatggtatacaagtttcagggaccctatttgacaattttcagagtgctctctatgctgattccgagtcgagtgtgtcagctgtgattacagtgcctgtggatctaggccgggttgggggggtgtgggcgggggaagggaagtctggcccggagcaattgctcctgccggtaaccccagcactttgggatgcctaaacaggcgtatcgcttgaggccagtaattcgagaccagcctgggcaacatggcaaatctgtctctacaaaacaaaattagaaaaattaactgggcgtagtggcatgtgcctgttgtcccagctacttgggaggctgaggtgggagaatggcttgagcccaggaagcggaggttgcagtgagccaagatcatgtcactgcacttcagcctgggtgacagaaccagaccctgtctttaaaaagggagttggtggggagaggttctagaatgtcatgtagcaaccagtttaaggactgggactcagggatccaactcccacagtttccctgtgtgaccctaggcatttgacttagcctttctgagcctcaggttttttgtttctgaagtaaaaggattggactaggtaatctccaagatcctaggaacccaggagaaagatgagaaaatgtacaagaatgaacactcaggtggaaatgctgcaatcctgagaagctcccaggatgaatgaaaggcacaggacctcttacccctcacccctgcccccctcaagagctggtttctcaaacctttctcttaggccccttcaaagggggaaaactaaaaattatacaagttatagttcaaggactttaaatagattatttatatgattgctcataaggatgaggctgtgaggagggaacaccttatttaatctaatgaaattccataggaaagaggccttttgtatattgaatcaatttatctgccttctcagtgcatctgtcatattctgaaagattctgggttgatcttttgcgataacctctatggctgtgagtgtgtgtgtgtgtttgtgtattttttaacattttgtataatgattggaggttggtaaaaagtaacacaacagtacttttttaatacaaacttggtgtggtcttgagttgtcttccattggagagcgtacgtgtgccacagattggtgcacctgccggcatctctaggattgcaccaactccctctagctcttcttggtggcctgcaggggcctagggcgcattcacttccctctgcttgactttacgtggtgttctagcgtcagacatcaggcgatgccgtgcattacccaagacactggacagctccggatcttcccgtctaaccactaatcaagttaaaaagaggaaattaacgctttcttagtagtctctgaaagaaactagttatttgcgtaaagatgacttggttttgtgttgtttatccctggggagaagggtaaagaagaccctcaaactggatttgctgctgaagtgcttttaactcacctgtgcggagagcggacttcaagagagggcgtgccggtgctccggacaaaacctggggaatactgaaagccaccaccaccaccgtcattccagcatgcagatctcagtcctgggttggtgttgtagggcatttatttatttgacttgacggcgcctttcaaagcttgcgaggatcccttcctcttcctcgtgtgcatctgccaagcctgtgccccgcgcctcgcgggtggacccgggctggtgggcggggcctgcagcggggtgggagcccggtcgcccggcccctccccaccccgccccgcccatctccgctggttcccggaagccgccgcggacaagctctcccgggcgcgggcgggggtcgtgtgcttggaggaagccgcggaacccccagcgtccgtccatggcgtggagccttgggagctggctgggtggctgcctgctggtgtcaggtgaggggtccgcggggagggggcgcgcttgggaaccgggaggccccgcgagatgccgcccctgatcccatccctgggcgccctgcaagtgacttaagagccttcggggcctcgggagagaagatgcaaacgccacggccggctgctgagacgcaactaggctgctgctgccgtcgattctgtaacaggagaaagccccatccgcgcccggattacagaccgtctgggccctaaactcagggggagactcccggcgtcttttgattccctgtcctcctgcagctctctgctggcgggcgtctaaataaagtagcttccccaaaagacccaagatcccaccgtggctgtcatctgacccttctggagactatcagttcaagtggaggcccccaccagtccccgagtgccctgacagccctccctgaccccaagtctgccccctcagtgccagccctccctacagatgtgcctcccatcacccgctgcacctcccctccttccggttcaggcccgagcaccctgaaatctggattctgtcccccagcgccccagctccatggcttctaaacctaaatccattgaaaccttttctgtcctctaaattgactgcctaggttccaataacaccatggtcacctccttcctttctcatgaactcttccctggccttccgggatacccctccggtttcccgccctgtcaggctgtctctgcttgggaccctcctgctctgtcaggtttctatgtagctaattgtgatgcccaaggccttttctctccttccctggcactgttcctttgggggatttcagccaaaccctggcattaaacacgggctataggcccatgactcgcacatttatatctctcttggtaccagttgggtgatgggtggtggtttattatagtcttctacttttctacttgcatgtaggtttcaaattttcttttctttctttcttcttccgtttttttttttgtttgtttgtttttttgtttttttgtttttttttgagacagggttttgctctgttgctgtggcccaggctggagtgcagtggcttgatcttgcctcactgccacctccgcctcccgggttcaagcgattttcctccctcagcctcccgagtagctggaattacaggtgtgtgccactacgcctggctaatttttgtatttttattggagatggggtttcgccatgttggccaggctggtctcgaactcctgacctcaggtgattcaccttcctcagcctcccaaagagctgggattacaggcgcgagccaccatgcctggccaggtttcgaattttctattaaaaggtttgaaaataatttctgtctctagcccacatctcttcttggtgtgacctctgggctcattcatctggctgtctccctgacattcctacttcagcctctctccagcatctccaacctaatgcagctcaaatgggactcgtgagttccccagctgagctccaatcggggcaccagctgcttaagcccaaaatggacattgacctcagcttttatgcatcaaatgtatcaggaagtctccagtttgtttttacgtctggaaatatatctgaaatccatgtgcccaccctaccccctcatagctttctgccaccagacaaatccaaggctcctttgtctgtccccattttactcctgcccctccagaaatttctcctcacggctgttcaaagaaaatctagactcctcagcacagccaacctgtctctccctccctcacccacgtggcctttgaagacatggagccatagaggagaaccaagtgctggatgtgggctttttcatgggcatctgttttgaggagaaaagttgtaaatgtttttgtcttattttcatagcattgggaatggtaccacctcccgaaaatgtcagaatgaattctgttaatttcaagaacattctacagtgggagtcacctgcttttgccaaagggaacctgactttcacagctcagtacctaaggtgggtctggcctcactattggcaggaacgcaccggaggagccagccctgggctggtcactgggttgggccacaggaggaagggagtctgactacggtcaccgtgtgactgtgacaaccctcagggagcctccctgccagccttttgctgtctgggaaattctcgtggccaccttttctcttttaggttttctagttgtgatggttgacgatttgactgttaatcacagggctgctggcagatacagacattttatcatgcgtatgtagatataatcagccatagtggtaacctcatgctgtgcccatcccagcttgtttgtcacagttgatatattttaaaagaaaaataccactgctgtcatctctaggtatgagtagtattgctggaagtcagcaatgttgagtggatgctacccaagaaactgagatatgcaaagcggtcaggaagccccttgctaccatatatcacctgttcccctccaatggattataacatcatgccccagtgccatgcgcgatgcacataatttgcataatgagtgctcagtttctccgtggttccatcctgaaattaaaagtaagacagctactgactgttaaaaaccccattctcggacaacagcaggggctgtgaaggaagagtgagtgtcaccctagacggtcatctcagtggtgatctgaacgccctctacctctcctgcctgtcagtgtttccctacgcctggtgaaggaagtcagtgccagcactcccttggcagcctgccaccatacgccacatgctggactgcaggtgacacacctttaggccaggcgcaaacagcagcaggaggcccaaggctgacaagccaacacacctgctttctgtgtgactcagaaacatacgaagatagacaagtccttcagtgaggcaggaggaaatttcttcccagatccagctgtcatttcacaaaaatccccaaggcctgctacatcagagaagaagtagaaaggtgaataagatagtcctcgtctgtgcattgctggcttttgttttttaacttttagttcaaaataattccagactaacagaacatttcaaaattttaagtagaatacaaagaatttccaaatagcctacaatcagattcaccaatttttttttttttttttttttttatgagacggagtctcgctctgtcacccaggctggagtgcagtggcgcgatctcggctcactgcaacctctgcctctcgggttcacgccattctcctgcctcagcctcccgagtagatgggagtacaggctcccaccaccatgcccagctaattttttgtatttttagtagagacggggtttcaccgtgttagccaggatggtcactatctcctgacctcatgatccacccacctcggcttcccgaagtgctgggattacaggcgtgagccaccacgcccggcccaggttcaccaatttttaatgttggtcacattctctcccttcctctctctctctcatgccctttgtgctgtaatatttcactgtgtatttcacaagaacaaggataatctcttacatcacatagtacagtgagaagctcaggaacttttacattcataaaatacttgtatctaatttacagtccatagtccagtactgtcagctgtcccaaggattgaaggagggcatactctataattaatttttttcctgatgtgcattttctagtactgattggctttatcatttgctttctgtgctgtctctactcagtctgaatagccacggagattttactgtggaaaattaaatttcttctctgtctgtctgtctccctgtagtttttcttgttctgtgctgtgcttttgggtttgtttgtttgtttttcttttttttttttttgagacggagtctcgctctgttgcccaggctggagtgcagtagcgcgatctcatctcactgcaacctccgcctcccgggttcacgccattctcctgcctcagcctcccgagtagctgggactacaggcgcccgccaccacgcccggctaattttttttagtagagacactgtttcaccgtgttacccaggatggtcttgatctcctgacctcgtgatccacccgccttggcttcccaaagtgctgggattacaggcgtgagccaccgcgcccagcctttttttttttttttctttgagacagggtctcactctgtcaccaaggctggagtgcagtggtacgacctctgctcactgcagcctccacctcctgggttcaagcgattctcctgcctcagcctcctgagtagctgggactacaagcacatgccaccgtgcccaactgatttttgtacttctagcagagatggggtttcaccatgttggccgagctggtcttgaactcctggcctcaagtgatccacctgcctcagtctcccaaagagctgggattacaggcgtgagctaccacacccagcccatgccatgcctttttgccattatagtcgaggcacttggctttgcatgtttatcttttatgttagcgatcccaatgacttcatgaagtgacttcatgagggtatccacacctgggttccaggtctcccccgcgtggaactacagagtgagtatggcatgtgctggagaaaacaaaatatgtgctggccgtgtccttggggaagatatttgatccctaaagatgtgattgcctcatgtggctctacaaaagagttgtttagagtttagcatgagcaattgcacagcacaaactctctgttgtttgcgtgcattggggcagggcgtccagagccgggggcacttcagaggatgtactggtgattttaatataaaaacatccaaaacaattagatgtaaatatgaggaatgggtcatattacctatttaatgcggggagaagtatttgtacatgcaataaaaataacctagtgaaggccaggcgcggtggctcatgcccgtaatcccagcactttgggaggccgaggtgggtggatcacctgagatcaggagttcgagaccagccttaccaacatggcaaaaccccatctttactaaaaatacaaaattagccgggtatggtggtgcatacctgtagtcccagctactcagaaggctgaggcaggagaatcacttgaacccaggaggcagagattgcagcaagctgagattgcaccattgcactccagcctgggtgacagagtgagactccatctcaaaaaaaaaaaaaacctagtgaaaaagatgttattgcaaaacaacttttgaaatactgcacatgctggacaattgatgcattagtttaaaagaaggaaatgggccagtaatcccagtactttggggggccaaggtaggataatcatttgaggccaggagttcaagaccagcctgggcaacatagcagcctcttgtctctacaatttttttttttaattagctggacttgagttggaaagaaggaaggcggaagggaagaaagaaggtagggaggaaaaaaaatatggccacatgtgagaaaacccccttaatgaaatgaccgctggattttccaaatgatgggatgttaagcagccgtgaagaaatggttgattgacaaatatttgtggtatattaagtgaaaaaatagcatgatcccaatgatctctatctactttttgcaagggatttttctaggtatcactaagaatgctgtgagatgtgatgtgctaccttagactatgaagtcaaacagatctgagttcagttgggcagatttcttaggctctccacgcctgacccctgtgtacttaataaatgttggctgttgttatttttatcaccatcactttcatcatcacttctgggagcaaccaaattggttttggcaccagaagatgtcttgggggaccaatcagatagctcctcacttttttattttattttataaatttttaaattaaattaaattaaattttttgagacagtgtcactctgttgcccaggctggagtgcagtggtgcaatcacgtctcactgcagcctccacctcccaggctcaagcgagcttccctccttagcctactgagtagctgggactacaggcgcatgccaccatacccaaataatttttttattttttgtagagacaaggactcaccacgttgtccaggctgttctcaaactcctgggctcaagtgatcctctgcctcggcctcccagagtgctgggattataggcgtgagccactgagccgggccagctcctcactttttgcaggatgagagcctgggcttcctttgatcacgtggagccaattacacctccttggctgttgcgagcttagattcaggagattgtatttccctagcatccaacaggcatgtccaaatgtcatctcttttcttccacttcactttctgtcatgttccctttagcggttgctgtcggggctggtgttctgactgagactgatgaattgttttataatttttccagagtaattgcaatgatagtcatttataggacaggacagtcacgggtcacttaacaactggggtagattctgagaaatgcatcattagacagttttgctgtgtgaacgtcatgcagtgtacttgcacaaacctagatggtgtagcctcgtatacacctaggctatgtggtttagcctattgccccaggctgtaaacctgtacagcatgttactgtactgagtgctgtaggcaatcgtaacacaatggtatttgtatacaggcatatcacagagataaggcagttttggttccagactaacacaataaagctaaaaccacaatagagtgagtcacatgaatttttttgtttcccggtgcatctaaaaattatgtttatactgtagtccattaagtgtgtgatagcgttatgtctaaaaaaatgtgcacagcttaattttaaaatatttacttgcggaaaaatggtagcaatcatcagagccttcagcaagtcataatccttttgctcgtggagcatcttgccttgatatggatggctgctgactgatcagggtagtggttgctgagttgcagtgactgtgacaatttcttgaaataagatgacaatgaagtctgctgcatcaactaactcttcctttcatgacagatttctctgtagcatgagatgctgttcggtagcattttactcacagaagaacttctttcaaaattggaatcctttcaaaccctgctatcaactaagtttatgtaatattctaaatcctttgttgtcatttcaacaatgttcatagcatcttcaccaggaataaattccatctcaagaaaccactttctttgctcactcattagaaacaactcttcatctgttcaacttttatcatgagattggagcaattcagtcgcatcttcgggttccgcttctaattctagttatcttgctgttttcaccacatctgcagttacttcctccactgaagtcttgaaccccttaaagtcatctatgagggttggaatcagcttcttccaaacccctgttaatgttatattttgacctcctcctatgaatcaccagtgttcttaatggcattttgaatggtgaatcctttctgggaggttttcaatttaccttgcccagatccatcagagaaatcactatctatggcagctataactttacaaaatatatttctttattttattttatttcattttattttattttttaagatggagtctcactctgttgcccaggctgaagtgcagtggtatgatctcagatcactgctgcctccacctcccaggttcaagtgattctcctgcctcagcttcccaagtagtgacaccacaccaggctaatttttgtattttttttttagtaaagtcagggtttcaccatgttggccaggctggtctcgaactcctgacctcaagtgatttgcccgccttggcctcccaaagtgctcagattacaggcatgagccactgtgcccagcttcaaaatatatttcttaaataataagatttgaaagtcgaaataactccttgacccatgggctacagaatggatgttgtgttagcaggcatgaaaacagcattaatttccttttaaatctccatcagagttcttggggaaccaggtacattgtcaatgagaggtaatattttgagagaaaactttttatcctgagcagtaggtcttaatactgggcttaaaatattcagtaaaccatgctgtaaacagatgtgccgtcctccaggctttgttgctccatttgtagagcacaggcagagtagatttggcataattcttaagagctctctgattttcaaaatggtaatccagtgttggcttcaacttaaagtcaccagctacattagcccttaacaagagtcagcctgttctttgaagctttgaagccaggcattgacttctcctctgtaactatgaaagtcctagatgacatcttaatagaaggttgtttcatctacattaaaaatctgttgtttagagtatccaccttcatcattttagctagattttagctagatcttctggataacttgctgcagcttctacatgggcacttgctgcttcaccttgcacttttatattatggagatggcttctgtccttaaaccttatgaaccaacctctgctaacttccaacttttctttttttttttttttttttttgagatggagtctcgctctgttgcccaagctggaatacagtgacacaatctcggcttattgcaacctctgcctcccgggttcaagtgattctcctgcctcaacctcctgagtagctgagattacaggtgcatgccaccatgcccggctaatttttttgtatttttagtagaggtggggtttcaccatgttggtcaggctggtcttgaactcctgacctgatgatccgcccacctcagactcacaaagtgctgggattacaggcgtgagccaccacacccagccccaacttttcttctgcagtttcctcacctctttaagccttcacagaattggagtgttagggtcttgctgtggattagactttggcttaagggaatggtgtggctggtttgatcttctatccagaccactgagactttctgcatattttcaataaggctgttttactttcttattattaatgtgttcactggagtagcactttaaatttccttcaacaacttttcctttgcattcacaacttggctaactgtttggcccaaggggcctgttgtggcctgcaatatgccttcctcactaagcttaatcctttgcagcttttggaatagggatgcccgaggagaaggagagaggcaggagagtggacagtgggtggagaagtcagaacactcacaacatctattgattaatttcactgtcttatataggtgtggttcatggtaccccaaaacaattacaacagtaacatcaaagatcactgatcacagatcaccataacacatataatcatgatgaaaagttttgaaatattgcgagaattaccaaaatgtgacataaagacatgaagtgagcatgtgctgttggaaaaatggcaccaatagacttgctcaatgcagggttgctgcagaccttcgatttgtaaaatgcaatatctgtgaagtacagtaaagcaaatcacaataaaatgaggtatgtctacatctaaatgtatttaaacatagaaaaggtacagtaaaaatacagtatcattatcttagggcatcaacgttgtatatgtggtctgtcatctaccgaaatgtcattatgcagcacatgactttattgaaaatcattgtaatatctttattttggtaaatttttgtaaatcaatgtctcataaatcacatgcccctgttttcaaaaatacgtaatcaaggaagcaagctttcttggtcaagtatgctgaatactcaaccccttggagaggcacgtagtcattaagatgttcaagtctctgagaagttctgttttgaagacacgtatttctatgtttaacacagtttccactcccgcgccgcccccccctccaaattaagtaccagtcagcctcagggagactgaagccagaactctcctgattgacctatctttttgattgtgtagttataggatattccaagataaatgcatgaatactaccttgacggaatgtgatttctcaagtctttccaagtatggtgaccacaccttgagagtcagggctgaatttgcagatgagcattcagactgggtaaacatcaccttctgtcctgtggatgacagtaagccattttgttttccctttttttgtaatgtcatcatcttgccttgtttttttccacattggttggtccatcaacaagaattctttgagggcccacaaatggatggccttgcacaaggagcttaaggaatataataaagagagttgtatccctaaagaattcatgggagagacagaaaaagataggcatatcatcaatgcaacaattaaatataaatctaacaccttcagtgcctcaaggatgtgactatgttggggcccgtgctgttgaggagaagttctggaaggattcttgtggtgaattttctgggagaaagtcagtatggaattatgacttaaacaaagaaacataacgtgataggcaaaagaatgaaggcagatgtagagatggaaaatatgatgcggacagccggcttgcccagagcgaaggacagagggagggatagggctgatggcaggtgggttgggtcagactggttggtcagcatcaaaaattgttcccaggttaggtggagattgcagtgagccgagatcacgccactgcactccagcctgggcaatagagtgagacttggtctcaaaaaaaaaaaaaatattgttcccaggttagatttggagggtcatggtgaccaccagagtcccctaaatatgagatgagcatatttagaatatcaggaattgaaaactaattaaaccatatattagcaattgagagagtaaagaagattagaggttaaaagaacctaattcacaaaattcacatacagcccttcaaaactcacatagagaaaagcactaaaagaattgtctctggctaggcatggtggctcacgtctatgatcccaacactttgggaggctgaggtggtggatcacttgagcccaggaattttctttttttctttctttctttctttttttttttttttttttttgagacaaagtctcactctgacacccaggctgaagtgcagtggcgcgatctcagatcactgcaaactgcctccagggttcaaatgattctcgtgcctcagcctcctgagtagctgggacttcaagtgcctgtcactatgcccagctaaatttttttgtatttttagtagagacggggtctcaccatgttggccaggctggtcttgaactcctgaccttaagtgatccacctgcctcagcctcccaaagtgctgggattacagacatgaaccaccacacttgtccttgagcccaggaatttaagaccagcctgggcaacatggtgaaaccctgtctctacaaaaaacaaaaaaaataccaaaaaaaaaaaaaaaaaaaaattagccaggcatggtggagtgtgcttgtagtcccagctacttgggaggctgaggtgggagagtcatctgagcctgggaagtcaaggctgcagtgagccattatcacaccactgcactccagcagcctgggtgaccagagtgaagtcttatctcaaaaaaagaagtgtctctatatggggagtggtctttatgccggtccctgctctggacccccatgacccctacagttacatcctccctggtagagaatgatgctaggatgcctttcttccctttcccaattccatcccaagcctgggtaaaaacgtcttacttttggaatcataaattatcaaagttagattatattttctaatggtacctttacaaaaacaaaggaaagatgaacagaaaagtaagtttcacaatagttaaaagtacaagtttttgctcctataattgctaactggcttaccaggtcctaacttgtcccaaatcctgttagctcccatccatggaagttccctttagagcctaggtacaacacggttaagcagcttgtcaaaaagtcatacaggtcatgagtggctgagcaaggattcagacccaggctcttgcttctgtgctcttagcaactactacccaatattggagatttgcctcttgaagtctatgtattttagtgataggaaagtgtttccaggcatcatgcataacctatttatacttgctttggcaaagtattccaacaagttttcttgtctggttttcagacgagcactttagaatgatggaagcaggtccattaacagccctgaaaaagtaacagcagccaaagaagaatacaggacataactcaaacaccatgattgcctggaaccatttatgaatcattctatagttattattgagtacatctgtgtaacagctgcattctgagcactgaagctacaacaatgaacgagacaaaatacctcatggagcatatatgtgctaatcaggaatacagataataaataaatagatacatattacatgacaggtagtgactatggttcttaagaagactgaagcaaggcaataggacagaaagtaatgggagctgcacttctacatagaatggtaagatacagtctctctgaggaagtagcatttgagcagagacccatatgaagtgaaggagccagccacatgaatatctagtaaaagagcattcagaagggaaacagctttagacattgttggaaatatatatggttaattatatatgttaaacatgtaaaggtggccactaaaaataatagagatgccatctgtagcttccatcctgaaaaaggaaataaaattcaagccaacaaaaagcaggaataaaagaggagaagacaccaaaaacataaaatagaaatttaaaaagaaatccttatagaaaatacaaaatagcgtagctggaataattccaaatgtatcagaaaccacaataaacataagtggactaaacttcattaagaaagacaaagattatcagattttttaaaagaaactaaatccaactacccttcttagccatgtcaatcaatgtcatgacaatagtatatcaaagcagtgtacttccgtggactaattgttctgcatggttatgaaaaattaatgttgaagtttttaaaatgtgatttttgattgtcattttgcttgttcttctgcttagccattattggaccccctggaatgcaagtagaagtacttgctgattctttacatatgcgtttcttagcccctaaaattgagaatgaatacgaaacttggactatgaagaatgtgtataactcatggacttataatgtgcaatactggaaaaacggtactgatgaaaaggtaaggttggctaattgcatttcagaggtagtaggctttcatattctttgcagaatcttgcaaggtggcagcaccttatggactggtcctctgtaagccaagagcttcccagactgaggggttactggtatctctggctcaagcttcccagactcctaagggatatgtgtagagcagactttcaggacaaagtctgcacagtgacagcagacctttccctccctgaagggcagctgcaggggaaggcacagttgagtcagagttagctaagggaacttggagctggctgaattaggtgatcagcaaattgacaactgtcccatgacatcaacccctgtgtcccacacacaccgcaaatcagggacgtccgtggtcaagacagccccttgttgctctattcttcaggggacaatttctttaaaaacatgggcttggagtcaaaagatctgatcggaatatcacccgtgccaccatgtgccattggtcactttcttgaccccagcctcctcaagtctgcaaaatgggcataataacttactttattaataaaacaaggataataacctacttcgtaagattgttggggaatttaatgaaataatagaaaatataaactcatcccattgcctggaatgatgtatatatggtcagtacatcagtacatgaggtttccttcctctttgctagacatgttaaggttatttttattcatccttggtcaaggtttattctgacacctaatgcttctgagctgaatgccattcatggtcctaaactgacatatatatgttatgtatgtcatattacatatatgttatcccttccacattaaatgttgattttaccacttaattctcaaagtgtttgggaagaagggatcacccatgtttattatcttaggaatgatgtagttaaatttatatacacacactgcatagcccaaaaaatctcaagttaatttttttccccaaaaaatgttccattaaatgatgcagtgtcttagtcctttcctgctgccacaacaaaataccacagactaggtaacttataaacactagaaatttatttctcacagttctgcaggctgggaagtccaagatcaaggcaccagcagattcagtgtctggtgagcactggcgtgctctgcctcctagatggtggaaggcaaagggcaaggatgtaaacagctcccttgctgctcttttctaaggtcaccaatggcattcaggaaggctctgccctcattatttaatcacttctgaaaacctccacctctgagtcctatcatagtgacagttaagtttcagcatatgaattctgatactcacaatcactgatcaaatgcaggcatctctgctaagccctggggtataaagataagagcagattgctcccctccgggagctagcaacagacctcaattaaggatctagttttacagtgagcagggtcaggtgcctcctgaggcaagtgtgaatgcaaactccacttactgtttagcttcttttctcacacatgcccacaacatgggcatctggttacacatttgtcctctctcttcggccagttgtgtggcaaccttctgtgtgacttaccgagtgtggaaaggctgcctgctgcactgctcctctcacaggtgcctgtgatgccaccaatacaggttttttgggggtttttttgaggcagagtcacagtctgtcgttgcccaggctggaaagcagcggtgcgatctcagcttactgcaacctccgcctcctgggttcaagcaattctcctgcctcagcctcccaagtagctgtgattacaggcatctgccaccacaccccgctaatttttctatcaatacaggcttatatggttcccctctagaatgtagagattcctgaggcggtgccagactaggtccctaaactcacagcatgaagggcttttgagaattctttcttcctgttgggagaaagtgagaagataaaaccagaagttgcccagacgtgaaagggcagaaaaagccccagcagggattgagaaggtccctctactactatgccaccaccttacctgcttgcctctgagtttaatctttgaaaaaatttgcattgtaaggttttagaggcactggacttctggaactgcaagcccgccatttttttcagttgttgctttgatttgcttttggtcttttaatttacttattagaagttaaaccattttcttcatatattccataagtctaatccaattattgacctccatgggcttagctcctcatgcagtagaggcatataggcatgctgtcaacgaccccaaccccaaaaaagaactaaccaattgcgactgggtgtggtggctcacacctgtaatcccagcactttgagaggccaaggtgggcagatcacctgaggtcaggagttcaagacaagcctggccaacatggcaaaaccccgtctctacaaaaatacaaaaaaaaattagctgagtgtggtagtgtgcacctgtattctcagctactcgggaggctgaggcaggagaattgcttgagcctggcaacggaggttgcagtgagccatgatcgtgccactgcactccagcctggacgacaagagtgaaactccatctcaaaaaaaataataattaaaagaccagtttattttatttatttatttacttttttctttatttctgagacaaagtctcgctctgtcaccgaggctggagtgcagtgtggggtgatcctggctcactgcaacttccacctcccaagttcaagcgattctcgtgcgccaccacgcccggctaattttttgtatatttagtagagatggggttttgccatgttgactaggctggtctcaaactcctcagtcccccaaagtgctgtgattacaggcacgagccaacacacccggcctgctttatcttttttaaaaaagaagtgatggcttgtgtgtcatttaagctggagaattcaggaaccaaaatggtttgtgggcaccactgtcagtccttgatgcaccccctgagtggcctcagggtccctgaactgagaggagcacctgctacctgctccttcctattttaagtctaaaacggctattatcactgataaatgtgaaaaaaaaaaaggtggtgcccttccactgcttagtcatgttcttatttttgtctccattactagtttcaaattactccccagtatgactttgaggtcctcagaaacctggagccatggacaacttattgtgttcaagttcgagggtttcttcctgatcggaacaaagctggggaatggagtgagcctgtctgtgagcaaacaacccatgacggtaagccctgagatgcacctccgctaagcatcctaaacagctttatagacacctgccctagacatgattgcatccaactcaaattccagctcagttcagaaatctatcgccctgacattatctctcagccctgactgctcagcttcatgctaggaaggagaccacacccgcttctgaggcagctcattcactcttagatcaaaggagttgctagaaaccttttctgtctggtggagcgaggtctgcctccatgagccccccttggcagtacttattctaccatcccaggctccctaaagcaaggctcatcagtcctcccaagaccaccagcagagctcaagccctgtcacataccccaaaggtctttcctccccaggcggcacatctccagccactgccgacatgtgatgggaagcaagtgtcaggaaatctgaccacggtcctcagccagtgctgcctgattcagggccccttatatgcaggaatccaggatgtcaacacagtccttcacacaccatatggatcacttctagcttggaggaaggaacgggagaaggaaagagagaaggttcccatgggcctaaacactgcatatttatgtgcagacacattgcagttgcatgttggtgaaaactgaggcccaggtgtctgcatacaaacagcaggccttcctataatttaaagatgttggtgaagggttcagcaagctcagacaatggaaggatgaaacatggcatgcggcatgcagtttgatcaaaaagaaaaacatgtctgccggacgtggtggctcacgcctgtaatcctaacactttgagaggccgaggcgggcggatcacctgaggtcaggagtttgagaccagcctggccaaaatggcaaaaccctgtctctaccaaaaatgcaaaatttagccaggtgtggtggcgcacacctgtaatcccagctacttgggaggctgaggtgggagaatcgtttgaacccaggaggcagaggctgcagtgagctgaggtcatgccactgcactccagcctaagcaataagagtgagaccctgcctcaaaaaaaaaaaaaaaagaaaagaaaacatttcaaatagcttgcaaataccagtaatcacccatgaactgacaaaatccaaacattttacaaaacaaaagggtatgagccattgaaaacctgctttcatcaaacaccattttcattttttcttaaaacacacctatcccatttaaatcccacaagttttcaatgagagcattagaaggatcttctcccattttacaaactagaacatgaaggttcagagagtgatgcactttggatgttgccctcatccagatctcacgctgaaatgtaatccccagtgctggaggtggcgcctggtgggaggtgacgggatcatgggggcccatttctcatgaatggcttatcaccatccccttggtgctgtcctcccgagagtgagtgacttcctgagagacctggcggtttaaaagtatgtggcatcttgctctctcttgcccccacttagctttccaccatgattgggagcttctagaggcttccccagaaacagataccgctatgcttcctgtacagcctgcagattcatgagctaattcatcctcttttctttataaattacccagttttagttatttgtttatttgttttttggatggagtctcactctgttgcctaggctggagtgcagtggctcgatcttggcacaacctccgcctcctgggttcaagcaattctactgcctcagcctcctgaatagctgggattacagtgcccaccaccacacccagctaatttttttatttttagtagagagtggggtttcgccatattggccaggctggtctcgaactcctgacctcaagtgatccacccacctcagcctcccaaagtgctggggttacaggtatgagccaccatgcccagccatccagttttagttatttctttatagcagtgcaaaaacagcctaaaacagagaggttaagtaacttgcccaaatgctagtaaatgaaaaggatcaaccagaacacaggctcattcatctaagcccaggttatgtttcctgtaacttactacctatagattaattccataggtaaactgaggcaccgtgtccttgtggataaaacaggaaagagtagtctgcctcatggtgtggtcagatgaatctgaaacaagttagagaactttacacggaggatgtagattagtagattctcccacagttcacaacctatgcagagcagggtcctctctcctgccccctgtggaactctccatctggggtgagtaacaaaagcattccttgaatcatgtcaccatcacccagatgtgtccttgtttaagatgctaagatgccccagtttgagacaccaggagacccaagcactgccccagaggttcattacccaaaataaaataacagggcggggcccatggatccctgtttgaatgagtctccgggcgccaaattagagaactaccgaaatattaatggaaggatggatggatgagtaggagcctggaactttctcaagacctgggatgtcaaatcccaaggagacctcacgtgtccagctgtggtgtggactgggggccgctccagccagctcactgccgtatgaccctggaatcaccaagagcagactcacatgtttgagctgaacatgctggaagtgtgggccagacggcaccgcttctgggctccggtgcatgaaacaaacaagaaccaagaactgggataaggagtgctgaaacccgcaaggacaggagctggggagatgggaggccgcctgcgggaatgaaagcacaagagaacgagggccatggggttgggggcggcacaagtgctcaggtccttccagccgcttccctcatacagatgccacttccatccctcagacgtttaaggagtgtgcactgtgagccacgcactgtgacaagcaccatgtcgtgccagcaggtgactgcacttgctgtagctccagggtcatgtgctgtgtcagggctctttgatccctgtgtccctttaaaacgacatgatcttcatgggcagtgtttgttctcttggcccctctcagagccaaatgctgtgctcgtgagggcggtgctggttggcaggggatgggcacagagaaatcaggtggccagggcagctggaggagggacctggagccgaacaaggggagctgggaccacgagcaacccaggtgacatcctggactctgtcaaagataagcaaagcaggacgctaattaaagcagtcaaaacattttattcagtaatgactggagttgggaaaagggccgagttccatttactcagaggtgttttaaagggagaacgagggccggggcaggaggatcgcttgaacccaggagttcgagaccagcctggccaaaatagtgggacccccatctctataaaatattttaaaaattagctgggcatggtgacacatgcctgtcgtcccagctacccaggaggctgaggtgggaggatcacttgagtcctggaagtcaaggctgcagtgagctgtgtttgcactactgtactccagcctggacaacagaacaagactctatctcaaaaatgaaaataaataaaaggagaatgagggagtagaaagaaagaatgcgtggggagttgagcagaatcagggaagtgaaaaaaattttaaatcagctaaggggatgggtcagtgccgtgaggccctctgtgtctgtgaaccggtgtttatcaaggctaggcttctaccctcccacagagacagggagacagaggccctgtacttcctgatgatttcaaaagaatggctcgcagatcattgagaaaaatatccctgcgttgtgggagatacatacatgtctcaaagggacagaggaaggattcaccactataagccctttttaataaatgctctccgaaagagaggtcaaggcctcgcatcaggggctgggaagaacaaatggtaagttccttaggcagccttgggtttttccagacaggaattcaagggtgtggccttggcctgctagaagctatgctggggtttggccaagtctcttagtgcaggggtttgtttgttttggctttggttttggtttttgaggcggggtttcactctgtcgcccagtttggagtgcagtggtacaatcatagctcactatcacagcctcgacctcccaggctcaagcgaccctcccacctcagcctttcaaattgctgggactacaggtgtctgccatcatacccagctaatttttaaaaaattttttttgttgtagagaaggggtctcactatgttgcccagactggtctcaaactcctgggctcaagtgatcctcccacctcggcctcccaaagtgctggggttacaggtgtgagccaccacacctggcttagtgcaggggtttggatagagttgttcacgcagagtttctgtttttctcaatatagaacgagatggtgcctgtgtttaactcaggctcaggtgtccaggggagtatcacttgctgtgtcaaggcagaagtggtatatccagacctgggaggcccattgctacactgccagtagtaggtacagtggatcagaattcttgcttgttattcttttgatgtatgtcagcaataattccagaaaccaaactttggagaagataggaaaagggtgaaactcttcaaaaacctctgggtcctccaaccagttgctgtttctgagacgtcccccaagataaacgtacaggctctgttttcagggattgtgatggttaaaatgctcttgggatcactgtgacccgacctgtgacaagaatgtaacatgcccattacccctggcagaaacggtcccctcctggatggtggccgtcatcctcatggcctcggtcttcatggtctgcctggcactcctcggctgcttcgccttgctgtggtgcgtttacaagaagacaaagtacgccttctcccctaggaattctcttccacagcacctgaaagaggtaggtaggatggagtgagatgtggatttgaaaaccttgatcggaaagagctttcctttctagttagggctgcccaattccagacaacatgttttccaggaaaacacacacgcgcgcgcgcacacacacacacacacacacacagacacgcctcttgtgtgctggtccattctcttgtaaccatgtcaggtgaaggaacagccccgaggaaaggggcgcggggttgtccagtatccctctctgcacctagggcatcgctccttctccagccttcactgcccaaagccccaggtccctgaggagcaaaggtgatggttctagggcaggaggggaaaaacagagctcagtgtggaagaaagagaaaactggaggctaaatgccaggaaatcaccagagggagagaatgggaggaaagaaaggaacatttccagttttggaatatacgagagcgattgaaattctgggtagtgtttcctggactttaggaaggctatttgtaaaagggttaggaagaagaaacaatgcacctgactaatgataacaggactgaagaagccctaagaaatgaaactctggatagtcactgacactagagaatgaaaagattccaagcccggacccaaaggaactatctttggtctcatttcccaggaagcagactctaagatagagatttgtattcaaaaggcttgatggggaacatccttgggaataataccctaaaggagtgaaggtagccagatgtggcagagagaggttgagctgtcacacagccacaacagaggcctcagccaatcccatgtggcctctcgagctggggtggccctttagagatgtcctaagctgaggcaagagggatgggcgtgtgaactccacattggccatgcgctggatgtgggctactcccaggaaggggccctaagctagggtgagaggtgagacagcagcagccaggagctaggagcacgagtgcctcattcctgaaggcaccacagcctccattacagtcacccctgggaccacttggatctactggaagcagctcctccaggatctgagttgatctcgtttcctggggagggttacaggaggaagatgagtggaatgcactccagcccccaccgctgctgctggtgtcgggaccacaaaggaatgcttgtgggctggctccttcctccgctgccctgagggcccgctctcctctcccgggaggagcctgtgctgtaggggctgctgacctgattgggtgacccagccctcatcccagaaagcactgagcctccggtccccaagcccatctcaggcaatggcctgtccctgcacttgtcaatttgctgtcaaaatcgggcaggggagtcccaggaggtgcccagtgactctggcgggtacccactgtgatacagtggtgacttctctcttgcctgccagtctcttggcctgaggaggtggcttaaagtttatcgggccttgtttcatgtcccctggtagaaatgctcccactctgggaaccttctagaccaggtgtcagcaaactttttcttaaagggccaggtaaaaaatattttagaaggccaggcacagtggcttatgcctgtaagcctagcactttgggaggctgaagtgggtggatcacctaaggtcaggagatcgagaccatcctggctaacatggtgaaaccccgtctctactaaaaatacaaaaaattagccaggcgtggtggcgggcgcctgtagtcccagctcctcgggaggctgaggcaggagaatggcgtgaacccgggaggcggagctggcagtgagccaagatcgcgccactgcactctaacctgggcaacagagcgagactccgtctcaaaaaaaaaaaatacaaaaatacaaaaattaacccggcatgctggcgcatgcctgtaatcccagctactcgggagactgaggcaggagaatcgcttgaactcgggaggtggaagttgcagtgatccctcacaccactgcactccaccctgagcaacagagcgagactccatctcaaaatttaaaaaattttaaaatttatatatatatatttgaggttctgttggcaagaaataaaaatcaaaattatgtagtcacttatataaccacttaaatataatcatttaaaaatccgaaagccatgtgaaaaaacaagtggtaggccggatctgccccgtgggcctttgtttgctggccctgccctagacccacagagcctcaaatcacaaggccagggagcagcggtttccccagtaggtcactgggcatgatgagggtgaacagggccactcctgccctgcgcttgcttcctgacgcaggtgttccacctgctggggacacagccccacatgattgttggtcttgggtgcatgccaggggctggaggacaatgccttgccctcaccaggtgtcatctccaagctggcgcctcccctgcactttcaacaggccgctccgtccttcttccagtctggcagctgctgggtggtgcagggtgggatacgaccaggggggtcccgccttcactgtcagtgggcccattggtctggcaccatgtgatacggcgtctctactagtttgtcggggctgctgtagcaaagtagcactcgttgcgcagctgtaacaacgggaattgattctctcacggttctcgaggccagacgtccaaaatcaaggtgtcactaggatggtttccttggaggctgtgagggaggatctgtcccaggcctctaccctaacttctgagggttgctggcgatctttggcgttccttggcttctagaggcatcacccagtctctgccttgatcttcacaagccttctccctatgtgagtgtctgtgtccacattgcccctcctttatacagacaccagtcacgggaggagggctcaccctgctccactataccctcattctaacttaactgatcccctctgcagcaaccctatctccaaatacagtcacattctgaggtagagggattaggacatatgaatttcttttttttttggagacggagtctcactctgtcacccaggctggagtggagtggcatgatttcggctcagtgcaagctccgcctcctgggttcaagtgattctcctgcctcagcctcccaagtagctgggattacaggtgccctccaccacgcccggctaatttttgtgtttttagtagagacagggtttccccatgttggccaggctggtctcaaactcctgacctcaagtgatctgcccgccctggcctcccaaagtgctgggattacaggcgtgagccacagcgcctggcccagaacatgaattttgtaggaacagaattcaacacctaacaggatcctctaccaggagagaaaacacctgtgaaaccttgggaatcctgacaggccctgcaggacacgaacagcaaatcactcctaaactaaaggttagctccagccaggatgcaccactgccccttccagagtggtgcaagagtcgacgtcatcagcttgctaccaggtggctggtcagtctcctcggggaatgccgtcatatcaggggctcagcattgatctctgtcgcaggcaggttggacattccacagcagtggtggctacccagccgtgggagtgggagccccttctttcaggcccacgcgcagcctccatccctgccaccacggctgctgtgttcatgagccctgtgccatgtacaggtgaccagtggcagaggctggctgacatccactggctgtgtcatcatgtctccctggctgtctgctgtctatgatacatgctctcagtgggagttaatatgggatgcagaaatctccacgctccagctactccctcaggtccatccttcttcccaaacgtccttgtccctaaccttccagtcttccttccccagggcccctgaccaccaggcttgtcactaacccctgcctgggatcccacagctggcctgatcttgggctgcttttctttccacataaaggtgatgatcagacccacggcccaaagctctgcccgtggggacactttctccctggttggggctgaagtgcagcagcgggccactttcggtgtgtgcccacataccatgctaaccttgccatgaaaccaggccggcctttcctcctacttctgctaggcataattacccatccccctttatggtcatcatgtgagcagacacagacacggtgcgacaggggtagaggggacaggagtccgagccacctgcatgtggccaacatgcaccctctgaccccatctcaggacctactgggtctcaggcctcatgatggtcacttctgggcagcaccatcacctcgcgtccctcgtcagaagctctgtctctgccgggaccccatagcgtcccaggagctgctttttcaaacagagtacaattatctgctgcagatggccccgcctgaccccagaactctcgtatctatgttgtgactttcctcttgggatttgccataaactccacccagcatcttttcccaccccagacacttcaaggatatgcgaagtcacacattccccaggttggattcacaggccgtccctggtgggtaatgtaccagtcctgaggtgtgcatagggctgcaggctgcacggcccataccttctgcagggccctttcctgcctggggcccctccgtgccagcagcctcctgtgtggtttgataaacatattggaacagtcagtattcctaggcgtggaacatgctgcctccagaaccctgaggcctccacagcacaatgcttccttcctagtggtgggaggggcaagatacaataattggtcctttaaagaggatgtcctggcatgccccactgcaagggtcccctcaaatatcacagatgtggcaggtccctgaatctctacagggtgagtttctcaccctctgcagtgtgtgtgcctcaccaatgccttgccacttcttggcgtgtctggtcctattaatgtattgttgtgatagctaatatcaggcccttgtccccgcaccaccagtcagctgatgcaggctgcctctggcaagggcacagagccttgaccgaggcaactgccttctgggaagggcacagcctagaaagggactcagctgtgagccatttcagcctccgatattcctggaggctgggggaacaagcgcctcctccacaaaagggatctgggcaacatagcactgcatctaccctcgatggcaagtggggcacaggaccataggcaagtgtttcagagcgactagaaccccctacagagagtgccaggccgagcatggtggctcacacctataatcccagcactttgggaagccaaggctggcagatcacttgaggtctgaagttcgagaccagcctggccaacatggtgaaaccctgtctctactaaaaatacaaaaattagccacgcctgtaatcccagctactcaggaggctgaggcacaagaatctcttgaacccgggaggctgaggttgcagtgagcagagatcgcgccaccgcactccagcctgggcgacagagtgagactcgatctcaaaaaaaaaaaaaaagtaccaaggagactgcagcaccagcatgaactaagaatcctctatgagcttttgagaagccacagctgcagcaggaagaacaaagaatgagggtgggccctttgcttgggtaaaaggtgttgtgttaactgagaaccaaaaggaaacaaaattattcacctgctatttttgcttctggcttcaccatcagagaaactggtcagacaggaaagaacagacggaatgaacggtagaggggcctgctggcataagctctcacctccgaggctagaagactttgcagacttgaccgtggagccagcccctgtaagatctgagaaatcagagatgggagtggagggtgctggagaagggccaggcaactacggagcagttcgaggtcctcacatcacgactttctccagcttgactcataatgatagaatccattaaccaggatccagaggatcatttcgagttcagggagatttgctaggaatggagactttgagttaaaaaagcactagggaggttcatcctacactgatctattgagccagccaccagtttgtgtgtgtgtgtgtgtgtgcgtgtgtgtgtgtgtgtgtccaaccgggagactcagctgatactgcttccttgagatttaatacaccttcctttgatctctcctgtccccattatcccaggaaaatccagagtagcttccagtccattctcattaatccactggatccaaagtttagagaggttccccttccctccagcctccttcctggcccaacagaggagcaccccaccaccctccatcagctgctcaaaacccacaagggaaaaatccctacaggtccatgccaggaggtagtggagctaccctcaggttccattaagtcataccagaaggctgagtgtagaaatgacattaagaggggttccatctgtagggaaagggttcaagatgcaaagctttacagaaggttctccgtctaattgtgaagattaagagcactggtggacctaggaagatgaagaatggagagtgggaaaccagcagagatttcaggaaatgtataggggcatcttcatcgttcaaagcaccggagagacaaagattattagactgtggtccctgcccttaaggagccctggctacaggtgacacaaactgagaagagttggtgtctattaaaagtgagaaggcagctctgtctgatagagcatattgcaagccatgtgtgttttagatttgctagtagccacatttttaaaaagtccaaagattgggccgggtgcggtggctcacgcctgtaatcccagcattttgggaggccaaggtgggcagatcacgaggtcaggagatcgagaccatcctagctaacgctgtgaaaccctgtctctactaaaaatattagccaggcaaggtggtgggcgcctatagtcccagctactcgggaggctgaggcaggggagtggcgtgaacccgagaggtggaggttccagtgagctgagatcgcaccactgcactccagcctgggtgacagagcaagactccgtctgaaaaaaaaaaaaaaaaaaaaagtccaaagattggccgggcatggtggctcacacctgtaatcctgacactttgggaggctgagacaggttgatcacctgagatcaggagttcaagaccagcctggccagcgtggtgaaaccccatctctactaaaaatacaaaaattagccaggcatggtggcgggcacctgtagtcccagctactcaggaggctgagggaggagaatctctggaacctgggaggcaaaggttgcagtgagccaaaactgtgccactgcactccagcccagacgacagagcgagactccatctcaaaaaaaaaaaaaaaaaaatcttcgtttgtatagcagtgagtatccccacttgtaaaaaaataaaataaaaataaataataaatcaaaagatgccagaggccgtggctcacgcctgtaatcccagcactttgggaggccaaggtgggtggatcagctgaggtcaggagttcaagaccagcctggccaacatggtgaaatcccatctgtactaaaaatacaaaaattagctggcgtggtagcacatgcctgtaatctcagctacttgggaggctgaggcaggagaattgcttgaacctgagaggtggaggttgcagtgagctgagatcgtgccactgcactccagcctgggtgacagagcaagactctgtctcaaaaaaataaaataaacattaaaaataaataaataaaataaaatagattttccagccaggagttctgtgaaaaaatctttgtaaacccagaaaaagaaatggagaaaattgatcattaactgtcctctttccctccacagtttttgggccatcctcatcataacacacttctgtttttctcctttccattgtcggatgagaatgatgtttttgacaagctaagtgtcattgcagaagactctgagagcggcaagcagaatcctggtgacagctgcagcctcgggaccccgcctgggcaggggccccaaagctaggctctgagaaggaaacacactcggctgggcacagtgacgtactccatctcacatctgcctcagtgagggatcagggcagcaaacaagggccaagaccatctgagccagccccacatctagaactcccagaccctggacttagccaccagagagctacattttaaaggctgtcttggcaaaaatactccatttgggaactcactgccttataaaggctttcatgatgttttcagaagttggccactgagagtgtaattttcagccttttatatcactaaaataagatcatgttttaattgtgagaaacagggccgagcacagtggctcacgcctgtaataccagcaccttagaggtcgaggcaggcggatcacttgaggtcaggagttcaagaccagcctggccaatatggtgaaacccagtctctactaaaaatacaaaaattagctaggcatgatggcgcatgcctataatcccagctactcgagtgcctgaggcaggagaattgcatgaacccgggaggaggaggaggaggttgcagtgagccgagatagcggcactgcactccagcctgggtgacaaagtgagactccatctcaaaaaaaaaaaaaaaaaaaattgtgagaaacagaaatacttaaaatgaggaataagaatggagatgttacatctggtagatgtaacattctaccagattatggatggactgatctgaaaatcgacctcaactcaagggtggtcagctcaatgctacacagagcacggacttttggattctttgcagtactttgaatttatttttctacctatatatgttttatatgctgctggtgctccattaaagttttactctgtgttgcactatatgtgttcatgatactacctgtgtgtcattgttagatactgaaaaaggctctagtttgccatcttgatgtccactcattccacaagtacttcctagaccctgcctgctgttgaccaggcactgtgttaggtactaggtctcagtcatctgggagctctcagtctaaagcttcaaaaactagaattgcagtcaagggccagatccgttattaaaaaaaaaaaaacctagaaataaaaagtatagttgtggaagtttaaaaagccaggggacaggcttaacaacagattagacacagaactgagcaaaaaagggagtctccaggtacaatggctcacttctgtaatcccagaactttgggaggctgaagtgggaggatcacttgggcccaggagttgagaccattccaggcaacatggtgagaccccttctctacaaaaagttttaaaattaggcatggtggcatgtgtctgtagtcccagctactcaggaggctgaggtgggaggatagcttgagcccaggaggtcaagactgcagtgagctatgttcatgccattgccctccggccctgcctgggtgatggaatgagaccctgtcaaaaaaaaagaaagaaagaaaggaaagaaaaaaaagaaaagaaagagaaaaggaagggtattagggttctccagagaaacagaaccaatagaatgaacatagagatttatttgaaggaactgtggaggctggcaagttcaaaaactgcagggcagaccaacaggctagagacccaggtaagagtggatgtttcagcttgagcaaaagcagtctggaggcagaattaactcctcctcaagggacctcaggcttcttttctcttaaggccttccttcaagtgatagaagtgaaactcacccacattatggagggtaatctgctttactcaaaaatctatggatttaaatgttaatctcatctttaaaaataccttcacaccaacatcaagactcgcattttacctaatcagtctagctggttgacacataaaattaaccatcatagggagggtagatctgtgattgcttttttgaaacttttttcaatgtttgctgcatgtatatagaaataaaatttggccgggtgtggtggctcacatctgtaatcccagcactttcggaggctgaggcaggtggatcacctgaggtcaggagttcgagaccagcctggacaacatggtgaaaccccgtctctactaaacatacaaaaattagccaggcgtggtggtgcacacctgtaatcccagctatttgggaagctgagacaggagaatcacttgaacccaggaggtggaggctgcaatgagccaagatcgtgccactgcactccagcctgggtgacagagcgagactccatctctaaataaataaataaataataaaataaaaaattatttttgaaattgaattttaagatcttgttacacttttttaaagaaaaaagaagttattatccagggcacagtacagagaaacaaaagaatggaaaatatgagtggttaggatacaagcctgaaaaatcaagctgcaagcgtagattagcaagctggaagcttgcacaggtgaatgcggcagctgtgccaatagaaaagggatacctggaagccaagtacatccaatatggaggttcctcctcccttctctttgtcgtcatgtgtgcaggtgtcatggtgctggccaggtagagaccccatctgcagaataaaagattagggtgggatggccagcctctttgtgggctatgtaaatggcacagctggcccaaccaatccactatgccctatataaatcaaacactgcctcttcaagctcatctgtaaaaccaaccgtatcttgccccaaacccggaaacccactcggacccactcgcaccccctccctctgcacaaggaagctctctcttctttctttcaactattgaacttccactgttaaacccagtttttgtgtgtccatgtcttcgatttcctgtgtctgtgacttcaatttccttagcataagacaatgaatcttgggtatttccccagacaaaggatgccacttcaccaggaagtgactaagggaagaacacctgtgggaaaatgtccaagaattctgggaccagaaggggtttcagcagagcatctgtgggccaccaatcagacattctagcagaaaacatatgtccagttggtttgaaagattccctgaggggaagacagtgtaagccatcctcacccccttccacccttcctcctcgctctttctggctgcctcgccttgttgaaaatatctcacttccttttggggctcctgcccctcccctaacatacctcccacacccatccccagactggtttagcctccagggcacctttgttccttcctctcacaaccatgggtctcagccgtagctgcacactgtggccgccaggagagctttagaaatgtggatgcccaggccttaccatgaccaatgaatttcagctctctgcagagggatttttgcatcagcattttttaaagctcctaggtgattccagtttgcagtcaaggtggagaacagctgctgtagcagagcagttatgatagattgaaaggacgtgcttacctgcacttctgtgtgaccttatgttatctggctttcaaaggggtcgctttcttttaatacccagctaactgactccactcattaccttgtgcttccacaggaagatttctttcctgaggggttgtgagtgtctctgggaaacatgccccaggaatgcatccttcccatgcacttcagccttctcggctgctcaccactgaccacctgggaagcaattctccaagttgctacccctttctttgtgcctaataagataatcctaagtagctggtacaaagaaatatttgttgaattaatggataataaataatgatggctaggtgcggtggctcacccctgtaatcccagcactttgggaggccgaggtgggtggatcacctgaggtcaggagtttgagaccagcctggttaacatggtgataccccgtctctactaaaaatacaaaaaattagccaggcgtggtggcaggtgcctgtaatcccagctactcaggaggctgaggcagaagaattgtttgaacccgggaggcggaggttgcagtgagccgagatcgtgccactgcactccagcctgggtgacaagagggaaactccatctcaaaaaaaaaaaaaaaggtaaacaaaagccttcttgggatacatgacaattatacatgcagattaaacagagagctgtaagttaacaaatcaccataaaacatatgcaagcgaaaaacaaaaataaaacaaatatgcaaagtgaaagaaaacagttatgttctgtacaggatatccagatgctacagtctggatgtttgtgcctctccaaaattcgtatgtagaaatctttaggaggtggtgaatgggattaatgacctcataaaagaggagctgcccatctcttccaccatgtgaggacacagagaaggtgccacctatgaggacaggccctcaccagacactcaatctgctgatgccgttctcagaggtgtttgaaccagagcgactccatcttgaagaggggctgggtaaagtaaggctgaaacctactgggctacattccttggacaatttctgttgttttaaaccacccagcttgcgatcatttgttacttctgccgcaggaaacttaatccagcacggaaagactctgttgttttaccctgaccagttctaatatcttcttagtatctaaaatggggaagaagatgggcagagggtcattcagatttattttacgggaacttagtatcttactcttctcagcaagggagttagctgagaatgactgggcatgctgcctcactgtcccatttcctgaactctctagttcagaaaatgctgttgcaaatcaacttccttaaaaaacaaacgggaagtaaaaaacaaagtctattttatgaactagagactcagagactcaacatgatttttctccctgagtcaggtccatggttctgtctcctgaccacctcaccactcctgtttgaatcaagcagacaccaaacaatgtctttgtttccatgcccatgagaactcttaattaaacagccactgactattgggctggcactttacgaggtcaaatttattgctgttggattgtgataaaaaagataaccggaaggttaaagctgtgggagtaatatctctgagcaggaggagtcatggcaaggacagactttaaattgggttaaacaattcaatataaacaggaaacacaagccagctgcagttcccctcctcttggcctctgcctggggcctgcctgctactgggctgcccctgagggtcgcattgcacacctgccctatggagctgatggggtgggagcgatagccaacccttacttactgcttcctatgtgcaggtcttgttctaagcacttttacattttcatttaattcccacagcaacccagttaagcagatactattatctgcctcatttttcagataaagaaactatggcacagagaggttcaatcacttacctaagatcacacaggcaagaagtgacagagccaggacttgaacccaagtggtctggctccagactcaatcatctaagatagccacccatgatccccacctcctggtagccacacccttgagtaatcccttcctcttgagtgtggacagtgccaatgacctgcttctacccatggaaagcgacacaggtgacaggatgctgtcttagattccataggattgtaattctcatcttgccagcagactctctctgttgccttcttggacagcacacttgcatgaagcaagctgccatattggagaagtcacatggctaggacctgaggatgcctcctccagccaacaacgaacagggaatcgaggttctcaatccaacagcaacagggtgaggcactgttctaaaaacaagaggctggagctcaaggtggactttcagcgattccctgctcctcatccagggagctgccaatcaggcataagtcacgccccttctgccaggcaggagacttctttcatttctagggaaatggaagctgggggttccccgatgactgctccatgcgggagtgccaaggctgggcccccttgcgttaacttcaggcaactctgaatcatcatccatctccaacttctccctctgcccaatcctactttcctcactccttacaagtgttgtccccaagagcatttccagatgaatttcccacatgcaaattttccttccagagtgtgtttccagggaacccagcctaatctagagatcttgggaagacctgttgccgcagagtgatgacaataaagtctagacttcatggtattgaggagtgaacaggagggtgtggagaagctgggacagcaggtgtagccaactcctttgagaaggacggcttttgggctcagaagaagtgtgacagtgtctggaaggggcaagaagaaagtcgagggggggatatttcaggtgagtgatattacaccaccatggtatactgtcgcctgaggcctgtagacaggaaatgaggagtccggctcctagttagaatcccagggctggtttttcaggactgaccctgggcaactttaaggctgtaccaaggaggcctcacagggaggctccctctccagaccagaactggcatagccagtgcactgcagtccctggagggagctgcggtcaaggtctcaggcccctgctggccatgctcttatgcacacctgtgttcccagccttgcacgtgtgcccaaggccttcttcaggcacctcaactaaggcctccttattctcagggagtagggaagggggagccacgaagacattgttatcctctctgactcagttctttcctactcctggccctgtcctctctccctcccgctagttcccgggtccataaaactacagaagcctcaacagagagatgaccttcacccccacatctatactgattacttgactcttgactggagctctgttgcggggagggtggaatcctcttgcttctgcccctgcagtgagtgatgagggcttcactgttactttcttttttttttttttttttttttgagacagagtcttgctctgttgcccaggctggaatgcagtggcacaatctaagttcacttcaacctccacctcccgggttcaagcgattctcctgcctcaacctcccgagtagctgggactatagttgtgtgccaccatgcctagctaacttttgtatttttagtagagacggggtttcactatgttggccaggctggtatcgaactcctgacctcaagtgatccggccaccttggcctcccaaagtgctgggattacaggtgtttctgttactttcatttttgccttattgcttcaattagccactctctccagattagctgagcccttgacagatgcattgctgacacccatgagagaaggcctgatgtccctggaaaggacacaagagaagtgaccagacctacagcccccgctctggcctttggcaggaggagggatactcccgaggttgtcactggagagaacacaggccagggataggcaggtgatcccactaagggggtgaggggttaaggaagcctggtgtcttctatgttcctggcaaagtataggtcatcaacaaagggagggaagagaggggcttgggaggaaatgagtaggatggagcagctccctaggggaatgagaaagtgagcccacctgaccaggcagagggctgatggggcagtgccagagcccgctagaaaaccagtgacagaaaagctgcaaggtgcccagcttggtgaccagccagtagcagggtctgcaagatggctggctcctccttcccagcacaatgagcatttctgccacggcggggacagcacagcacagcgctgttggccaggaagggggctgaagaagagccctcccagggggaatgttggcattgttgctctgtttctagtttccacagcagtctggaggaaaaaaggacccagcctgaagatgcatcaaaaagtgattgacactaagcccagttgaacagccaaagcctgaaggcagggaaattcaaacaccgagtcagccggcaaagtacaagccatgctgactcggcctgctgagccatcagcaggatggctggattaccgctgatccagccaatatccatccagagattacacaccgtccctcaaggtgcaatcgtggtttctttttcttctggttctttcttcagcaccagctaacagagcatcactgatactgttttcctgaaagcttgcaaggatcccaaatgggctgccctgaaaggccccctacctttgagcatgcgcactctcctggggattttgtgagttccccagctcccaagtatacacagagccaga[450 bp omitted]gatagagtcttcctctgttacccaggctggagtggcatgatctcagctcactgcagcttccatctccccaggctcaggtgattatcccacctcagcttctggagtagcaggaactaccgatgcgcaccaccacgacaggctaatttttttttctttttatagagacagggtttcgccatgttgcccaggtaggtctcaaactcctgagctcaagtgatcctcccatctcggcctctcaaagtgctgggattacaggcatgagccccatgcccggcccttcaactgttaacctgtattgatcacctacactggtaagcaaaggtcactctcacttcctaggtcatgacctatcaataggtcagagtcctaacgggaaacccatgacacactccaacagagtaactgagaaaggcataatgaaggatcttattgtagcagcgtaggcagggtgaagggaaaccaaaaaacaatacagtagcaatagtgggaagctcactagctctaggcctgttgggaggcaggggaggagccattaccctggagagcacaggggtcagccacacagcccactaatggagaccctgcaggaagagagcacacctcattgtcccccaccctctgatcttgggctgatgcctcccactggtggaacccacccaaagtcagagggtaaaggactctgctgatgaatttttttttaatttttaatatttttttgagatggagtcttgctctgttgctcaggctggagtgcagtggcacaatctcggctcactgcaatctccacctcccaggttcaactgattctcctgcctcagcttcccaagtagctgggattacaggcacccaagaccacacccagctaatttttgtatttttagtagagtaagtgttttaccatgtgagccaggctggtctcggacctctgacctcaagtgatctgcccacctcgtcctcccaaagtgctgggaatacaagcatgagccaccacacccatttttgatgcattttatacaagaagtctcccagggcatggaacagggcaggcccagagaagaatggatctggagaggcagatggaaggcctacagcacccagggaagcaatatgagaaaagaatataagaacagagactgtgacaaagcaaatttagatccacaacattgacatttttataaaaaggtttttggaggtttatactgaaaagttttgtaacaattatattcatgtgtatcagatttgtaaggtgttcaaaccattttaacatatccatttggcttataattttcattacatttttagtttgaaagagtttaattgattaaatttttaatcattgtttaaatactcgaggaaccctagtttgtaaaattctagtttttgatataatagttatctgagcagaatgtgaatttacatcattgggtttttggggggtggggttgtttggagtgcagtggtgcgatcatggctcactgcagcctggaccccactgggacccagcggtcctcctgcctcagccttccaagtagctgggactacaggttcgtgccaccatgcccagataattttttttacttgctttgtagagatggggtctcactttgttgcccaggctggtcttgaactcctgggctcaagcaatcctcctgccttgactttccaaaatgctgggagtcaccacacccagcccaacaacattgttagctgtttaaaaacaatgatttagtgtgggttcccttcagtgtgtaaaaattattaaaatcgggtaagtttagcatctgtgggagccaggagggagctaagcgcctggtaaccttccacttcttctttccctaatttagatcatgtcattcctctgctaaaatctccatcatggcttcctatctggcccagaataaagcccaaatccttgccagaggctgcaggccccaccgactactcccctggcctccattcctctgcaccccttctctcctcattctgcaggggctcagcctacttgctgtgcttgtgtggagacaaacgtgactgcatcttggatgctaatccaccatgttgacttctgattcaccccagtccctgaagtcctcctgattcctactttatttactgtccttagtgtaagaacatgtactcgctacaaatcctgccttgagatcaaagcaaccataatactatcacaccaagtacaggctatgacgcacatagcagtcttgcctgttctggacagtggtctttcattgactctttggagtatgtaccctctttccctctagtatataatctctggatctgagggtaaccatgagaaatccctttgtcttgcagctgcccaagaccatgcttctgtctgtgagttccccaataaaccaccctttaccgacaaactgaatttgtcttccttgttcttcggtttctcagctcctttggcatttgagggcctttttgcatatagggccctttcacggaacagcctgggatgtgccagagacacatctgtctcagagcccgtgcatatgctcttccctaagcatggaacactttctatttacacagccctctccttgtgtcattgcgtccagtgtctctttcttagagaggccctctcccttgctgtctcttgtccctctttctttttcttcatagtatgtagcattacttgacatcataatatttcgattcaattcaacaaatattttttgttcacacatttgtccttgtccacactagattgtaggctccaggagagcacagacattgtatatttcattcactcctggatccccagcccttagaacagtgcttggtgcttaatagatggctcaagatctatttgttgaatgcatggatgtatgagtgaatgaatgaatgctcaggatctttcagtaaatccgtggctgactcatgcccagagttcaggtcttctatgttcctttcattgatagctgcattgccttccaggatttcccatctttcagatttccagaaattatgtatacatatatactgtgccctctcagctgatggcttccttttcctttcttcacagctctctggcatcaatttttccacttctcagaaacactttggcccacaaattcccaaaggaaccttgttcttcattctggaaaacacgatgccaacatatcagaataaaggacagataggagcttttgcttcaaagtgaatcacttcatggatgttaaagtgtcctgaaagattctaaacttcacaacttttgatagtaactgtactatatttgcaacatatttgcatatattaattgttatatctgaaaagcatgagattgctgttttataaaattaaatgaagtaagttaatattttattgctaggtataagaactgctgatgaggacatctatagaagtagaaaattctaaatgtcctaccatcaccaataagaaacttttgacagtcccgtagatacaatataatcacatggaaaactgtatacagtatattgtatgtgaagatcccacaaaaagaatagggactgtaggaaatataatcatctaagctacgggtaagaagaacatcaagattctttaaagcaatggctctcaaagtgtgtttcctagaccagcagcatcagcaccacatgaaagcttaggaatgcaaactctccagccccgcctcgggcctactggctcagcgactgtgagggagaggtctgtattttcatctatgttataacaggtccttgggtgactccaataaacactaaagttggcaaaccattgcctttaagggtgcataaggtgttaatttagtacaaaatttgcagttttctgtgttgttgtgactttctatttttgcaggagtagaaaagtaccccattgcagtagagataagtggatctgaaaccccaacagcagctgaagaggttctttatgacagctggaacctgcactccagttgcccttgcacgtttgtggtttagcagtcccagagacaaatctgccacttctggcttgcatccaacaaaagtgcagctgttcatcattaggagatgttggctgatgtacatagacatgtaagaaagattcaaagcgtcatggatggatcaccaataacaccagcatatgcaagaccagaggagagtgtgtgatccaggtcctaggattgacaaatgaggactcagtccctacttgggttggtgttttattttgacttttttctgaaacagcagagaagcttaccaaataatcacaaggagataagaaagtgtttacatttgtttcagttgctcttcactgcctccttatgaccaacactcacaattctatggtcttagcagttgcactaagaagtcagaagaacctgctattgtgggttcataatcttttattacctttcactgagaaacaatttatactactaaacaagatatcagttatgatgctcaagattttaagtgccttttgaactaaaaacaaacaaaaaaattgtgacctgcatataatgtaaatggtttatcttcaagtcaaaagccacaggtttacctctgcagctttactctttcctaaacattgctttcgtgtattgcttatgcatgctttctgcgtcccaaaaagtatgtagagaataacagtttaagtcctccagaggagttactacctctactacatgtttcattctcattacatgttgcattgcttattaatatctgtgttttgtagtggacttcatgaggacaggtaatgttaccaactgaattgtgtacccccaaaattcacatgttgaaaccctaatccccaatgtgactgtatttgaagtagggcctacagcaggtaattaaggttaaatgaggtcataagtgtggggccctgaatcgatgagattagtgtccttataagaagaaacagcagagaccttgttctctccaccatatgaggacacagtgagaatgtagccatctgtgagcaggaagggaggcctcaccaggatccaaatgagccagaaccttaatcttggacttctcaccctgcagaactgtgagaaaataaatttctgttgtttaagccacataatttgtggtattttgttatggcggcctgagcagactaatacagataccatgtctatcttgttcattatcctatcttctgtgttatagtttatcaaatatatgtttagtaagatgcatcctagttagaaggcattgaacttgggcttaaataactgctgcatcgtgttacatttccaggattttttctctctttcatgaactctgtgaagaaattttacttagaaaaaactgacactgtcattggcattacaagaggtgctctacaggacttgtgtgacccacagtaatcctgcaaaaaagccatgtcatccactcatggacagatttaagcttaaaattcttccagagtttgcaatgggatatctccctttatcttctctgtggtacagagacagttttctgttaatttccacataagggctttccatgaacatggtaaacaaaaaagggagaaagcaacaagttatagcactctgagtaggtaggtttcatgagagcagagaggtgatcaggaaggcagagatgtgaacagaccagatgtcttgggggctcaagaccagtatacatggtgtgggaacaaatattaagtcttttatttttatttttcaaatatttttttaaaggatttaagccaggcacagtggttcatgcctgtaatctcagctacttcaagaggctgaggtggggccgggagcggtggctcatgcctgtaatcccagcactttgggaggctgagacaggtgaatcacttgaggtcaggtgtttgtgactagcctggccaacatggggaaatcctgtccctactaaaaatacaaaaagtagctgaacatggtggtgtgcacctgtaatcccagccactcaggaggctgaggcacgagaatcacttgaacccgggagacagaggttgcagtgagccaagattgtgccactgcactccagcttgggtgacagagtgagactccctctcacagagtgagaggattccttgagcccaggagtttaaggctgcaccactgctagaatcacaccactgcactccagcctgggcaacaagcaagaccccatctcataaaaagcctttaaaatccctttttaaatgtctataaaaggcatccttttcaaatgtttattttgtatgtgatttacgatgtgcataaaaatatgtgcagtaatatgcgtatttagcttatagataaataacaatacacctactgggaatgcatgatcaacgttgttgttttcctactggaattatgtaataaaaaatatctaaaggctgctgttcttgactcaggtatgacagaaaggtggaaacaaaacgaggaggtacaaacactaatgggttaattaaaagtcagtcaacagaatagcagtggcaaaaagcttcccacactcctctgctgcctgcctctccccttcctgaggcagtcaggcatttgtctaagtcacccttaggcaaaaaattatagatctgttcttctcaataattgaattaaccaccctggcaatattactgcactcttcagtaggccaaagggaagagttcaccattctggcagttggtgtccacaatcttgcaatgtctcacaccctacttccctacttatcctacagggatgcttccagagataagttctgcctcaaaaacacgtcttcattttcttgagaaagactctgttaatactagctacctaaaaaaaatcaacctgctgtctcctttaaaatatatttaaaaaatactcaaagattgccaatgagaaaaataaaagaaaaagacaaacagaaccaattgactcttaaagaaatagaatattggaacagaagagaatgtcacagaaacccaaattctaaaagatcccacattcgtgcatccataaaatgagaacatgatgctatatattaaaaaatcagaataaagaagtgcttttaaaaattaaacatataatcacagaaataaatatttcattagaaatcaagtaaatcttccggaaccaaggacaaaaatataaagagttaaaaactagagagaacatattaggagacctcaagggtcaatccaggaagtacaattttctactaataggagtttaagaaagaagaaagaaaatggaagggaggaagtatttaaaacacggtgcaaggatgagacttctgcttctggccatgatggagtaacatggagcagatttactctttcgccttaaactataaataaacaaccaaaatagcacaaaagatttaaaatacatatttttagatattagacaataaaaaactcaggacagtaatccctaagagaagagaaacaattgagatgatctctacaattgcccaaactgacttactggagagaatttctaggcctcagcatagagagaaggactccatatccctgtgggtcgaggaaacgcagctaggagtccaaggaggccagggcagctagatttcatggagtagagaaccagacaagacagagcttcacacagagaaaaagctccagagagctgcaaagagtattaggctaattactgatcagacaatgtgtagtaaggaaacttgaggccagggaaagaaccacgctaaaaaagcaaagggataaatccccagggttcatgctgggctgaaaatagtttccaaccagcgtggaaaatctcataattcatgaagcatcaggtagcatactcagggggctattacttcaatagtggggcaaatgtgctcttacaccaaacacttgcctgatcctctctgacaaaagcaagcctcaaaagtaccaaaccatttccaagtagcttagctggatcccagaataaaactcaagcaatatttataggaataaagaaatatccagcacccaacaatgtaaaatttataatgtctggcacccaataaaaaattactagccatgaaaaaaggtaggaaaatacaacccataatgaatgagagtgttttttaacaaaaaaattaaacaaattaaattcaatagagtttaatttagcaaagaacaattcataaattgggcagcccccagaataggttcagagcaacttcagggctgccacatggtcaataacatttttaaacagaaaaaggaaagggatgtacagaaaacagaagtgagatacagaaatagctggattgatcacagctgttttgttgccttattgaagctggcttaaacagctggccacctgtgaatggccaaaactcagctgctgtgattggctgagactccgctacttgttacaagagcaaattacagtctgtttacacatctaggtaggctacagttcatgatgtacaaagaagcctttaggccagacttaaaatatgtaaggaggtagctttaggctaaatttaatttaacaagaagaaaagtaaatcaatagaaatagtagatagatttggtagattgggacattaaaacggttattgaaaccatattttatatgttcaagaagatgaaagaaagcattagtatattaaggaaagacatgaaatatatttttaaaagactaaatccaacttctagagatgaagagtacaatgtctgagatgaaaaatatactgaattcagattaatagctgattagacactgtagaagaaaagagcagtgatattgaagacatagtgatagaaactattcaaaatgaaagacacaggggaaaggacaagaaaaaatgaaagaatagcatcgaacacaactttaaggagtctaataagtgtgcattttgaaggagagtaaagcgaggataagaaaaaaattgaaagaatggccaatagttttccaagcttgatgaaaactataaacccatcgatccaagaagctcaccaaaccccagccacaaaaatgatacatgaaaattttcttcagctagacagacacaaatcctcaaatagaaagggtccactgaatggtgtcaagcaatcaggtgtccagatagtatttaggacaatgagctgaactgaaaataacaatcaagcctttattaactgcaaacaagaagcaaaaaagaggcggcagcaccccagtgttcctttttcccctacagaatggccaggaatgcagatacgcttatgagcagggctggccagaggtggtgtgggaggtgggaaagctgagtccttaaccacaaatccctctagaaaaatgcagtgcactgtagtgcacatgcaagtctggtatggggaggacagtttctccccatgaggcctggcagacaaagctttgtaatttctgtggtcaggattgaaagatcacgcacaagattttgggacggagccagactcctcaaatgaggagcagaatcattaggggaataaaggctcatcctcctctttccaatacactgatagatataaaatctggatatcaggaaagaaatctaggctgaagaccaatttgggagccatgagcataaatgacagtcagtgaactcacagaagaggaagagaccactataggagatgagaaaagaagatgagccaggacaaagcagtgagggacactaatatttaagtcacaagcagtggagtgggttgtcctggagattgagaagaatggccagaaagacagatgcaacagcaaacgagtatggaatcatgagaaaaagagcgtggggaatgatagataccaaatgctatggagaagtcaagtaaaatcaaggctataaaatgtctaatagatctgaatactagaaattagctgatgatctgggtgagaagagaataagcaaaacgggacagaaagataagctcagtgggctgaggaatacataagtgagaaaacaaagatagttgtggacaaatgtagacagatttggctacgaataataacaggaaggacggcttctggagtgaaagcagcatatacgcctttttaaattgggagagacttgagaatgtgtaactgttaacaagaagaaactaaagagaggagataaagtcatgaaaaaacgtaaaaataatcaacggatagccatccctatgaaggggtggctcacggaaccagacagagagattttcatttgactgaaagaaggatgtcttcccaacgacagggaaagacagaatggaagcaggtgcaggtgagtttgaagttttggtgatggagagctgaaacctgatctgttgactgtattttccaagaaactaggagctgggtggaggaacatctgttgaaaatgagaagaaaagctgtagggtagagatgtgaagtaagtgtaggtttttaatttcagctcaattgaggttgcagactatgaagttttgatcattggggctatttgatccttcaggttttctccagaaaaactagatcttccctctgagccctcctgaagtaggaaaaacagtaaccacgatggtcagaaaaaaataaccaaaattactgagcacactgtgccagacactaaactaagctcttggtgtgcattaactgattaaaaattcatcacaccactatgatatagatattattatagtccccatgaggaagcaggaaaaaagattaagtaacttgcccaagatcccagagtgacggaggtgggatagcaacctaagtcaacttcagaactcagactcttaaccagtaggccagtctctgtttaagagatacttagttaccacttgaaaaggcgtatggctgtcttccatgttactgcttaaaaacagacatctttctcagtatgcagtgagcatgcagccacactcaatctttcctcaagccatgtgaacacagactagaccttcaaatatgctgttccctttatttagaatgctgtatccctcttcttttcctatctcctacttatactctgcctccccttaaacatctcttactgcaggtcacctgctgcaatgtgtatccctcaccactaaactagtttagtgttcccaccgtttgcttcatcatcatcattattactattttgaaatagcatctcactctgtcacccaggctggagtgcagtggtgtgatcacggctcattgtagccttgacttcctggagttcaagcgattctccaggctcagcctcctgagtagctaggaccacaggcctctgccacctcatccaactaattgtattttttgcagatatgggggtctctctttgttgtccaggctggtctcaaactcctgggctcaagtgatcctcttgctgcagcctctcaaaatgctgggattacaggtgtgagccactgtgccagcttcactactatcttttactgaattgcctgcctactgggatgaggaaatgtataggatgataaagcaccaaggagaaagacattctggagattccagagtagaacggctcagattccttcctgaacatcctggagctagtgtttgtacaccctcaaagtctgtgccactgggctgctactcagctaggactcttctcctttcatctaccaaactctcctcccagaaagaagtgaatttattcttctggaaggttctaaagcagtgatttctaatccagggtgcacccaccctaggggtttgcgttggattacagggtccaccgaagtgcagtgaaattctatttacattctttaataagaaataaattaagcttttgatatttgatatataacctagcacaagcaccttcacttggtccaaatgccagagcatcacattgtcacattcagtgatgtgtgacacacttgagaacagagtgagaaactcacaaggtggaaatgcgcagcgatgcttctgcttgtacacttttggagtttgtgattatgtctaaccatttacttggcttgatgtgtgtttacaggtcgttagctagttttaactaaattaatgctcacaaaatggatgtgacaagattcttgcaaataaattggaaattaaagatagtactattaatacacaagtgaataagataacagcagccttgacatattagctaatcacagtatgaagccatcacattaggaagacattttccagaaaagcaaacccccacaatttctttccaagagtgtttaaagtcatatgatactcattcgttttggttctttacaaaatttcgtaattggtgacagtgtttagaaactgctttgggggttcttaatagcaaaagacaaaaagccacatgccccttgttcttctttctacaatatgacaaactaaaatacattcctcagtcagcaatagtgttggactgtgtatagcaaatacggctgacaatgcgaagaaacaagagttcaatttcacagtgtgggaaatctgccacgtaatcatatggaaacatgctctaaagcacagatgtttctaacatgtctttttccaaaagtgaaatacccaaggaacgactttttctttgttagccaaaaagggaaagataaaatatatactcaacagtaatttacttccttaattaaaacaaaaagttttagtgcccatatattggtttctaaataccatcccccaataaaaacatcatcaacaacaacaacaacaacaaaaagcagggccccttgaagaaatggctgattttaggactgagcaggaaaaatataagatgaacttggaacatcttgtgctagaaagtaaagaagtgttagaaaaaattaagagcatactagcaaaaggaacaagagtcagcttgaagtggctgccactggccaaatctaggacaatttgagcattaaaataaataaggagggtgaattggtagagcacaggtgatatttagggcggtgaaatgcctctgtatgatgctgtaatggtagatacatgacattatgttgcaagtggttatgtatgagaagggcaggagacggctcttcccccacccaccaggaatgtcaggtgatggttcaacaatcacattgcctctctaaaaataattcagcacccagagccgaattatctcctaatggtccacagctattacattagagtgttaattgaatgtaggcgccaagaagcaaaaagagcttccaataatctccggtattgggtgagtgagccggtgcatgcacattaagagacaaaacggcagagtatgaccttccgggggcactccatcggaaaagggaagaaatcttcagatgggcatgcgcacaacttcctaaacacactgcacatgttcacctcccaagtgtaagaagggcactgcgcatgcgggcagcccaccctaagggaagaatcatgggaaaggggtgcaaaaccccagaagtgggccagcctataaatcctagaatcacagttaaacgctgcatttgtccttcaatttgcccgcttgggtctcttccaagtgtactttcctttctttcccgttctaaagcctttttaaataaacttccactccttctctgaaacttgcctcagtctctttttccgccttatgcccctcagtcgaatttgctgtgcaggtaactgggatgccttctaccagtaacaattatacattgtaaaaacccatagaatgtacaacaccaagaaagaactcttacgtaaactctggactttagttaataatgtatcagtatacgttcatcagctgtaagaaatgtaccaccccaatgcaagatgttaacaacgggaaactgaaagcaggcttgggatgagggggtatataagaactctccacactgtctgtaaacctaaaactcctctaaaagttgtatattaattttaaaaatttaagtaaggataacaatgaactataaccaatgaaataaaataagaatctgtgagtctatactaataataaatggagaccgggcgtggtggctcacgcctgtaatcccagcactttgagaggccgaggcgggcagatcacctgaggtcgggagttcgagaccagcctaaccaacatggagaaaccctgtctctactaaaaatacacaattagccgggcatgctggtacatgcctgtaatcccagctactcgggaggctgaggcaggagaattgcttgaacccaggaggcaaatgttgcggtgaaccgagatggcgccattgcactccagcctgggcaacaagagcaaagcaccatctcaaataaataaataaataaataaatataaatggaaagaaagaaaagctctttcttaaattgtgtcaactaatatttgcagtgagagggtcagggttgaaaacttaccatttcatgaccatcacaggtaggatagttcaggcaaggatgattaatggatgttaattctagaagaaaagtttgatgaacagcagaatatttgcaggatttccgagtgtcttcccaccaattagctgcaggaggtggggtgggaggggaggtcgatggggggcggaatagtaactatacaatggagactgtaactataatactttgatacatgatcaaaattaacatcacatatgaggtactaataagcttaatgtgcctgtgaagggactgaggacaccacacaagccaggtacgcataatctgaaattaatcaggagaaaccatcagacaagtccaaattggagaagcattctataaaatagttggcctgtgtttttcaaaaaaaaaaaaaaaaatccccaaatcaaaaaaatgtccatgacatgaaagacaatggccagggaagtactctggattaaagaaagctaaagaagttcaggaaaataaataacatacatacatgactttgtatgtgtatttaaagagggagtgtagatatggcaaaatattaacgatttgctgaatctgggcaacgggtatgtgggagctatcttactatttttgcaacttgtctgtaatttcaaattatttccaagcaaaaagtaaaaatgggactgggtgtagtggctcactcctgtaatcccagcactctgggaggctgaggtaggtggattacttgaggccaggagttcaagaccagcctggccaacatggcaaaaccccgtctctactaaaaatacaaaaattcgccaggcgcagtggcacacgcctgtagtcccagctacttaggaggctgaggcagaagaatcgcttgaactgaggaggcagaggttgctgggagccgagatcatgccactgcacttcatcctgggcaacagagcaagattccctctcccctccccaccaaaaaaggtgaaaaagaacatgctgtatggaaaaactgcaagtgcagcctctaatggaccgttttgactagaataaaggagagaagggaggttctgggttaaggttacagagcttgcaccacaggggaaattaattcatgtcttatccttaaataaattattacagcaaaaaagttgaaactaaagtacacgaagtacttaccacagggtgtcacagctgtggcaaattttattaaagcacaatccaattttattaaaatacaattcaatgtttataataggttgtattaagatggggaagagtgaaaatcttaggaaaggaggaagaaaaggaggggaggaaattgtcaatgtgtttaaaaatctaattaaacttttcagtcattttgagctcattgttctaaatataaaaatgcatcctattccaactagtttgcaagaacttttggacagcaggaaatggaaattttaatttaaacatgcagagtcgttcaaaaggcttttaaaataagtattattttgtaattgcaaccaggaatttttcctcttccatttggattcacgtatcttcatggggtgtttttccacctttggtgttgttaaaacgaagtactgacacactcaaaatcaaacccccaaatcgatgaatcgtaaagtgataattcaaagttttttaaacgatacctaacagctggatagattgcctaaaaatcattattcactcaaactgggtgaatttcaagatacataaattatacctctaagatgtttttaaaataggcatatttcccctgggcgtggtgactcacgcctgcaatcccagcactccgggaagcaaaggtgagcggatcacttcaggtcaggagttccagaccagcctgggtaacacagcggaaatcccatctccactaaaaatacaaaaactagccgggcgcaatagcgcacagctgtaatctcagctactcaggaggctgaagcaggagaatcgcttgaacccggaaggcggaggttgtggtgagccgagatcgcgccactgcactccagcccgggtgacagagcaagactccgattcgaacaatgcaatggaatatatacatatatgtatatatggaacatatatacatatgtggaacaaatacatatatggaacatacatatgtggaacaaatacatatatggaacatacatatgtggaaccaatacatatatggaacatacatatgtggaaccaatacatatatgcaacatacatatgtggaaccaatacatatatgcaacatatatatgtggaaccaatacatatatgcaacatatatatgtggaaccaatacatatatgcaacatatatatgtggaaccaatacatatatgcaacatatatatgtggaaccaatacatatatgcaacatatatatgtggaaccaatacatatatgcaacatatatatgtggaaccaatacatatatgcaacatatatatgtggaaccaatacatatatgcaacatatatatgtggaaccaatacatatatagaacatatatatgtggaaccaatatatatggaacatacgtatgtggaacatacatatgtggaacatacgtatgtggaccatacatatgtggaacatacgtatgtggaccatacatatgtggaacatacgtatgtggaccatacatatgtgaaacatacgtatgtcgaccatacgtatgggtcccatatacatatgggacacatacgtatggaatatatatatgggacacatacgtatggaatatatacgtatatatacatatgggacacatacgtatggaatatacatatggaatatacatatatgggacacataagtatggaatatatacgtatggaatatacacgcatggaatatatacgtatggaatatatatgtatggaatatacacgtctggaatatatatgtatggaatattcacgtatggaatatatatctggaatatatatatatggaatatatatctggaatatatatatggaatatatatctggaatatatatatatggaatatatatctggaatatatatatatggaatatatatctggaatatatatatggaatatatatctggaatatatatatatggaatatatatctggaatatatatatatggaatatatatatggaatatatatatatggaatatatatggaatatatatatatggaatatatatatgcaatatacatatatggaatatatatatgcaatatacatatatggaatacatatatgcaatatatatatggaatatatatatggaatatatatatggaatatatatataatatatatacggaatatatatatacggaatatatatataatatatatacggaatatatatatacggaatatatatataatatatatacggaatatatatatacggaatatatatataatatatatataatatatatacggaatatatatatacggaatatatatataatatatgtatggaatatatatatacggaatatatatataatatatgtatggaatatatatatacggaatatatatataatatatgtatggaatatatatatacggaatagatatataatatatgtatggaatatatatatacggaatatatatataatatatatatatggcatatatacatggaatatatatatatggaatatatacatggaatatatatatatggaatatatacatggaatatatatatatggaatatatacatggaatatatatatatggaatatatacatggaatatatatatatggaatatatacatggaatatatatatatggcatatatacatggaatatatatatatggcatatatacatggcatatatatatatggcatatatatatatggcatatatatatggcatatatatatatggcatatatatatggcatatatatatatggcatatatatatggcatatatatatatggcatatatatatggcatatatatatatggcatatatatatggcatatatatatatggcatatatatatggcatatatatatggcatatatatatggcatatatatatggcatatatatatggctatagagatggcatatatatatggcatatagagatggcatatagagatggcatatagagatggcatatagagatggcatatagagatggcatatagagatggcatatagagatggcatatagagatggaatatagagatggaatatatatggcatatagagatggaatatatatggcatatagagatggaatatatatggcatatagagatggcatatagagatggaatatagagatggaatatagagatggaatagatatggaatatagagatggaatagatatggaatatagagatggaatagagatggaatatagagatggaatatagagatgggatatagagatgggatatagagatgggatatagagatgggatatagagatgggatatagagatgggatatagtgatggaatatagagatgggatatagagatggaatagatatggaatatagagatggaatagatatggaatatagagatggaatagatatggaatatagagatggaatatagagatgggatatagagatgggatatagagatggaatatagagatgggatatagagatggaatatagagatgggatatagagatggaatatagtgatgggatatagagatggaatatatagatggaatatagagatggaatatatagatggaatacatatatattccattgcattgttctttacaaacattcatttaattatgtaattgctaattaattgcttggttgttataacaacgaagtatttgattccttattttatctcatcatttaaattttatttcgcatattttcacaatgcactggatctattactgaggaatttaattaaataatcattcgaaccatgggctcgaattgtttactgataaagcccgacgaccaaaacagcctagcgactgctgtttggagcccctcggcccagggcccgtggctgttctctccaagggaccatctcgcccctcagccaagtcgcccggaaaacgagcgctcgaccgcctctgccccgctctcgctctgcacacagcaacggtctggtcgctcagccacttcctccttccagcctcatctggttcccaggccgctggggactcccaacgccactgtccaagactctagggtcagcaagcgccccgggcggagaagggcgaggacgaagagcgccgggccgcgaccaggagcccacccgcgccctccgactgcagacatggggaagagacgcgggaactccaaagtcgctgggtctgcgcaggtgtgtgccgcgatcctgtgaaggtcaaggcctcctgtgagggggagtcgtcctggaatgcgatggtgaagtgctccagaccggccataggccggaaagagtgaggaagaagagaatgcaggaggcctgcgatttctaaggcgcgcgcgcacaggggtgctgcaattaggatggggcaatgggagcttggagaaggggtgctagctaggaggaaaggcgcgtgcgtggaggaacggcgcgtgcgcggaggggcggtgtgtgtgtcagaagaggcggcgcgtgcgtagaggggcggtgagagctaagaggggcagcgcgtgtgcagaggggcggtgtgacttaggacggggcgatggcggctgagaggagctgcgcgtgcgcgaacatgtaactggtgggatctgcggcggctcccagatgatggtcgtcctcctgggcgcgacgaccctagtgctcgtcgccgtggcgccatgggtgttgtccgcagccgcaggtgagaggcggggaggagagtcttggcgcagggcgggaggtagggcacgcagctgggctacgggggcggcgatgctgttgggggcgacagacgcccagtctgggaaaccttcggtccactttgccgcgccaaagattaaacccgacctgggctcgcaaatcaaccaggagaaagtggtgttctgggtcctctcttgccgcttgcctgtggccgtgtacgggtcctcgggagcgcccgggtcccacccccgtgaaatggcggtgccagagctttgtgtcgagtttgattctttccgggaaagtaccgcggctccgctggtctgtttgataataaacaaaacatttcccgaaatgcatttcctcaatctggtgaataggcgcccagtcccacgggggagtgagctaagtgtggccaggatttctctgccctcaggattcatacaggccaataaaaaatgacagtcggagtgactgaagcataattgtcagttctcgaggtttactaagcctgcttcagggcgcatccgggaaaaacgtgagccacaaacacgtctgtgactggttttccagaggttttcaggaggtggggcaggaaggcagtaaggcaaatagttctgtgagaatttagttagtgcccaagaaatctgtattttaagataccatgagtgtcttgaagagaaaaagagagtaaagggagtcagttatgcagatgcctctgggtagatggagtcttgactttgttttgcacctgagaagataagcttgtaattgacatggtcagtgtggaaggcctgaactagtttttcagattaactttggaatgccatttgttgagaggagaggtccattcacattgttggggggcttagaattttatttttggtttacttaactacctacttttttcccaaagaaataatcatgttcaaaactcaatgaaatgttatctcaatgagattgtaatgttgctcagtctttcagaagtcataaaaatagtcatactttttaaactagtaaatgcaattctaggacccaagactaagaaaactgtccaaaatatgggaagacatttttatttatacttttttttttttttttttgagacagcctgttgcccaggctggtgtgcagaggcgtgatctcagctcactgcaacctctgcctcccaggttcaggcgattctcctgcctcagcctcttgagtagctggaattacaggtgcacgccaccacatccggctattttttgtatttctagtagagatggggttttgccatgttggccaggctggtctcgaactcctgacctcaaacaatccacttcagcctcccaaagtgctgggattacaggtgtgagccaccacgcccgatctatttatgttttagactttagttttaggaactagacttaggttgtagacctgaagttacagttggcatccccttgtttatgggagaccagcaaagaattgacttatgaatgatctgtcagggtagcccttcgcagatggctgagtctttttatccttccttggggatttggctgaagcataatgctagtaacagccattcgtttggaagagggtgttgcagtcacttggcctctgggcttaactaacttcccttttgcgtaagaaagttgggagaggtcctgagatttttttttttcttttacaaaaataataaaagaaaaatacaaaggcagggcgtcaccaggctaatttgctgaaattcttcatacttacttgggatgcatgggggaatggcaactattacaaggttgatagagagtgagaggtaattttgtagtgaggaggggtacccaaagagaatcagggctagcatcccagtgcaggagtccaggtggtctgtgagcctgcaagtgagttcaaaatactttacctgttggcttaggaaaccatatacctgtgtggtacatgatatcctatttctcaaacttttccacaaatatgtagtatacttttcctaggatgtgggtactagggtcctggtgcatcccatagtaatttctttgaagtcttttgtttatgaaaaacttgcattaaactcatgtttggtttgatgtgaaaaaagctttcccagaattttcatataaaattgacattccaggagggtgtgcattaagaaattaatttaaaattaggttagcggacaggtggcaagatataatttataggcatttatcatttcttaagctcttagctgtgtgccaggcagtaatctaagtgttttaaaggtataaactcattaagctttcagagcagtgtagatactgttatgcttagttaacagacaaggaaactgagcaacggagagatcaagtaacttgcctgaggctgtataggccagtccgtggaggagtgggaagtcaaatcctgagtctggactaatagccttggggcttaaccagactagactgttttcccaaaggccaaacaatttaaattcctgattgtccacttgtatgttaagggcctaattatcagtatctttcagttaactgtgagcccaaaaatatctgagaccggtctgaaatcaacttagaaagtttattttgccaaggttaaggatgcattcatgacacagcctcaagaggtcctggccacatgtgcccaaggtggtcaaggtccagcttgcttttatacattttagggagacatatcaatcagtacatctaagatgtacatttgattggttcgatctggaaaggcaggacaactcaaagcaaggcttccaggtcataggtagatttaaagattttctgattggtaattggttgaaatcaatggaaaggaatgtctgggatgtcctaaggggttgtggagaccaaaattttatcatgcagatcaagcttgtccaacccacagcccactggccgcgtgcagcccatgatggctttgaatgcagtccaacacaaattcgtaaactttcttaaaacatgaggggtttttgttttgtttgttttctttctgtttttttgtttgtttgtttttagctcatcagatattgttagtgtattttgtgtgtggcccaagacagttgttcttccagtgtggcccacggaagcaaaaagagtggacacccttgatgcagatgaggcctgcagatagcaggcttcagagagaatagattgtaactgtttcttgtgaaacttaacgtctgtgttgttgttaatggtggttagctttttctgaattccagaagagaggagggtataatgaggcatatccaaacctcacttcgcatcatggcctgaagtagtttttcaggttagctttggaatgcccttggtcaggagaaggggtccattctgatggttgggggacttagaattttatttttggtttacgtaactatctactttttccccaaaaaaaatcatgttgaaaactcaagaccttaagtttacagctcaagctgatcctgaaagttatctcagtgagattgtaatgttgctcagtctttcagaagttgtataaatgtaccttttagcctagtaaatgcaattctaggactctagattaagaaaactatccaaaatatgggaagacatttacttacatatttgtacagatatctatatttggatttatgtcagacttaaagatatagtaaaccattttggtcgtgaaaatgaatgtgaaaggttgaaagcaaccaaaattataaatgcattatatatatattagattaaatgtccatttatacatttacatgtggggtaattaattgttaatatactaatataaaacattttaatatactagtaaattaatatattgtatgttaatgttacataacaatttatgaaaaaattattaaaaggagattgccaataataatagagcaaaatctgtgaaaactaaaatcctgtttaataactttatttccaagcccctgtccatttatcagtcagttatttgttggtcttccaaatgccaacatgcctgtaacttcagggtctccttcttttagcagtaaaggattttttttctccctgaggaaatcactagctgtaccctataacattttctattcttgtctcaaggcccaaaattactagaattataatattctgcacaagatattgtaaatactacaaatgccatcagatcttttgttaaactctgtaaacccagttgctaccctttggctgcatagaatctataaattctaacaaatggatgagaaccaagttaagaattctagagtgggataaggggatgtgatgtattctattcagggatgaagttttagagactccaagtatgaaacagaaaattgaggatggggagacctgatgggtaccacattaagtttaaaaaaaaaaaaagtgttttctcagctgtctccccttttgaccccatactataagatctaactggaaagagcaagaagctgtctcagttaagaaagttctatacaagaacccctgtggtagaacaagtctacaacaagataacatgattgccccaaggcagaagtaaaagaaatattgtaggaaccataaatgaatttaaaagctgatcttttaaaaaatatataacttatcaaagtgagagatcagtcctttatgatatttaaggagttcctgtgaatgcaccattatgctggatactctgaaaaaatgcaaatcaagtatgaagcgatataaattctgcccttaaggaacttgcaatctagttggagatttatgtttaacacaaagaagcagtttttacaaatacttcttttgaggattctgggaagatggcagagtagaaagcaccaggaatctgtctcctcacctagacaagaattgtactggcagaatctgatgtaactattttggaactctggagtctattgcaggcttgcaacttccaggggacagacttagatggtaaattgcagttaattttggtctatttgagctcttagtacagtagcagctacccatcttccacctctcaacccttagcagacagctgtgcacgttattagagcaatctgcacacaacttacaggaatcaggtgggcaaaaagaaacacaccatccagatatctgggatctgtgctcttgattggtcattgctccttctcgtcacaaaagcgcaaagagatgggcggttgttgttgttacaccttactcattgttacaaccccctccccactcactcccctgccccatggatttaaagggctagaaatctccctctgcttcatttttctctttcacttttgggagccggatattaaagactaggacatttaaaaacaactgcatttatggggaaaattagaaagtcactgtacatacctagggaaaggctcaggagagaccttaagtttatagctcaagctgatccttggcacaggattaacaacaattacacagcaattaaacaaagcaaacacacacacacacaatgtagtctgggagagtgatgttagcaagatggccaactagaagccccttctgctcatcccctcataagacagccagaacaacaaataaacaactacattttagcaaacttaactaagagtgctagagtgcatcaaagaagtaacagaaatcctagtgagcagagaaaagtgggatggccacatggagaatgggaggaaatgccaggattcctaggatcatctgggaacgaggaggaacttcttcctatggcaaggagataaacaagaagatcccagctacaccatgggcaccaacagatctcaccactggggttccttagagtccagacagcaactaagccaagctgaggaagctgcctagagtctgcacagctgtgttccctccagagaaggagccaacactgtgctccacctgctgtggcccacacagctactgtgccactccaccttggaactggaactacttctggagtgtgtcttgcttcggggacttgtagccatggcttcctttcatctgaaccacgccaggctggtggctcaacatccctaagctaaactttaagcagctgttacacccttccctgtggagtcaagcagaggtggaactactccacctactcctaccccactgcccttgggctagagctgaagcagtatcctatttcctgggaacacactaccttggccacccagagcagtcatgcacccctgtgcctaagctgaagtggtatacggcattccagggaaacagggcctgaaccacccagagcagtcacactccccgggcctcagctgaaggagcacatcactccctgcagaatcagtgccctggccaaaccgagcagctatgcatcccagggctgagctgatgtagtatcctatgtctcagggaaacagagcagtggctgagctgagacaccctgttctacaggccaaataactgtagtaccccgcttccctggagctggactagtcctctagagcctgagctgctgagacactctgaggagtggagtcatcactgtgctgttccctaccccccattcccagcccagacaacagctatgcttcaccattttgtagtacttgctgctgctgctacacttggcctcacagtctggggtactgcttatccctagctattccaagatttagagtcatgacttcatggtgcctcatcccttgggacctgtgttgccactgagccctattagctcatattcccaaattaaaaccataccctgctccccaggcccaaacctccagagaaccccttctttatagtcaggccagtgctatgccctgacccccataggggtagaatcaaagctacaacccattctctgggcctaagctgccaggaagcacctccaggtcacaaatcctggctctgtgagcaactacgtccaagccctgccacagagagcaaacccacctcagcaaccaagtgtctcagtaggtttgtgagatcctgagcctaggacctttgcccagtagccactctgaataccttcatctggaatcaagagctgctgcagctgcatatatatagcccctgtcagacctgacaccaagaggtgttgccttggctgagtctccccattgtggggaagacaagaataggaggatcctaaaagccttcaacactgagaacattaacaacctacactaccactgccacaaacttctgcagcctaggcccctgaggcacccatttactactgacattgaacacaggtaaagcagctgctttaccataccactgcatctgtcaggaaacagtcaccacacccttcgaaaccagcatactgaaacccaactgctaataaaagactttatctttgaaagccactgtctgtaaagtttggaagaggtaattatcctatcaacacaaagacacaaaaacatgaaaaagcaaggaaatatgacaccaccaaaggaaagtaagaactctctaatggtggcccaatgaaaagaagatcaacaaattgctggaaaaggaattcaaactaatgatcttaaggaaactcaacaagatacaagaaaatacagatagttcaatgaatcaggaaaacaattcacaatacaaaaaattcaacaaaaaaattaaaacatgatgaaaaacaaccaaacaaatcctacagttgaagaattcaatgaattacatttaaaaaatacaataaagagcttcaataacagacttggtaaagcagaagaaagaatctctgaacttgaagatataccatttgatattacttaattgtagaaaaaacaagtgaaaccctacaagacttatgggacatcattaaaggaacaaacgttcatactatgtaagttacagaaagaggagaaaaggtaagaggcatatacaaactatttaatgaaataatagctgaaaacttcccaagtctggagagagatacagacatccagatccagaaagctcaatgattcccaaatagatttaacccaaaaaggttctctccaaagcacattattatctgttgtcaaaagtcaaagacagagaaagaattctaaaaatagcaagagaaaggcatcaagtcacatttaagaaaatccccattcagctaacagcagatttcttcacagaaaccttacagtgcagaagaggatgggatgatatactcaaacagccaagaatgctatgcccagcaaaactatccttcaggaatgagggagaaatacagtttttcccagacaagcaaaaactgagggaattcatcactgctagaccagccttatgagaaatgctccagggagtcctacatctggaagtgaaaagagagcagtcagtatcttgaaaacatggaaaagtataaaactctctgatagagcagatacacaaaggagaaagagaaaagaattaaaccttatcaaaccatcaaaccacaatgataaataataagagaggaagaaaggggcaaaggatattattagaaaactttaacaaaatgacaaatgtaagggctcaaatatcaataataatcttaaatgtaaatggattaaattccatacttaaagagactggcggaatatttttttttttctttttttttttttttgagacggagtctcgctctgttgcccaggctggagtgcagtggcgcgatctcggctcactgcaagctccgcctcccgggttcacgccattctcctgcctcagcctcctgagtagctgggactacaggcgcccgctaccacgcccggctaattttttgtatttttagtagagacggggtttcaccgtgttagccaggatggtctcgatctcctgacctcgtgatccacccgcctcggcctcccaaagtgcggaatattttttaaatgactcaattatatgctttctataagaaacccacttcacctataaagacacatataaactgaaattgaagggatggaaaaagttattccaagcaaatggaaaccaaaagctgtcaggaattgctatacttatgtcagattaaacagacattaagtcaaaaactgtaaaaacagacaaagaaggttattatataatgataaagggaccaattcagcaagaggatataacaattctaaacatacatgtacccaacaccagagcacccagatatataaagtaaatattactatacgtaaagggaaagatagactccaatatgatagtagttggggacttcagcaccccactctcagcttcggacagatcagcaaactccaagtacagtgaactcaaagagaccacaccaagaaacagtcaaacttttgaaagccaaagacagagaagtgacttgtcatacacaagggatctttgataacatgatcagcagatttctcacctgatactttggagaccagtgtattcaaagtgctaaaaaaaacaaaaccaaaaaactcaaaaccctgtatatggcaaaattgcccttcaaaagcataaggaaattaagatgttcttagatagacaaaagctaagggagttcattaccgctagaactgccctgcgagaaatgcttaaggaagtcctgaaaggtgaaatgaaagggcactagacagaggggacagtgcagattcaggcaggtgcaatggcttctggggaagacccagccagtggggctattgccagcatccagtcagctgccaccttccctgaccccagtgtcaagtgatgcgcagggtgatccaggtgtgtgaggggcagctggatgtccagactgagggcactggtgccatcagtggctatcctaccactcaattcatgacccaggtggtgatccagggtgatatcaccagttatgatgcagttaacacagaggggaaagctgctgagatacactatactttcccacccctgcagtgggagatggggcagggggtaccacatcagggagtacagctgctgttgttactacccagggctcagaggcactgcttgggcaggtgactcttcctggcactggtcaattatttgtgatgatgtcaccacaaggagtactgcagggaggaagccagcacttgattgcccctaggactcaaccttatttatttggacgtaacaccattgtaagtcaagaagcatctctatctatctatgaacatacaatgtgaaatcaaattgaggccataaaacagttgaacctcatcataagagtgactcatcggtgtcacttctaagaccaagaaaaattctatttttatgcagagaccatttgttttttaattaaaagacaactctatttcaaagaggaaaaaaaatcaactcttttttcagctctctcagatgcagaaatgtaattatcagcatccctgtgctgggagcaatcattagtttttttagatttttaaaatatacttcattatgtttcactgtattcattctttaatcagggatgtgagggatagaataacatttagaatatctgtacagtttgtatataatgttcttatttcttgttgcttttataggtggaaaaaatctaaaatctcctcaaaaagtagaggtcgacatcatagatgacaactttatcctgaggtggaacaggagcgatgagtctgtcgggaatgtgactttttcattcgattatcaaaagtatgtgactctacttactgatttgtcagaatgacctgaataatttttacaagtttaacaacaccataatttttagatttggaaagtgtttggtttttctattttttagaaatgttacgcctattttacataatatttttaactttgtttctgtagagacttagtcaaatacatctttgggtgttgaagcaaaaaattggggatgagggtggtagacagcgtctctaacccatagccattccttctttcttctgggtgttccagcttcttttttttttttttttaattattatactttaagttttagggtacatgtgcacaatgtgcaggttagttacgtatgtatacatgtgccatgctggtgcgctgcacccactaactcgtcatctagcattaggtatatctcccaatgctatccctcccccctccccccatcccacaacaggccccagagtgtgatgttccccttcctgtgtccatgtgttctcattgttcagttcccacctatgagtgagaatatgcggtgtttggttttttgttcttgcgatagtttactgagaatgatgatttccaatttcatccatgtccctacaaaggacatgaactcatcattttttatggctgcatagtattccatggtgtatatgtgccacattttcttaatccagtctatcattgttggacatttgggttggttccaagtctttgctattgtgaataatgccgcaataaacatacgtgtgcatgtgtctttatagcagcatgatttatagtcctttgggtatatacccagtaatgggatggctgggtcaaatggtatttctagttctagatccctgaggaatcgccacactgacttccacaatggttgaactagtttacagtcccaccaacagtgtaaaagtgttcctatttctccacatcctctccagctccagcttctttcaatataagttggggtctgagctagggtatatcttgaagatatggcattgtactccaaaaggtccatcgaagaccttggaataggccaccaggtttcctgtgatcaggctttcctattatctccatgatatactatattttaattttaggtacactttttttttttttttttttttgaggtggagtcttgctgtgttaaccaggctggagtgcagtggcacaatcttggctcactgcaacctccacttcccggtttcaagcgattctcctgccttagcctctcgagtagctgggattgcaagcacatgccaccatgtttgactaatttttttatttttagtagagatggggtttcgccatgttggccaggctgatctcaaacttcttacctcaggtggtctgctcacctcagcctcccaaagtgctaggattacaggcgtgagccactgccctggcctagatacactttgtaaatatattgttaactgggcatggtggcatgtgtctgtaatcccacctacttgggaagctgaggcagaagaatcgcttgaacccaggagacagaggttgctgtgagccaagtttgcaccactgtactccagcctgggagacagcaagactccatctcaaaaataaataaataaataaaataaaataaaaatcgatatattggaccttgcatttctaaagactcagtttttctggagtgttgatgtctcttccttagtactttctacttaattattcaagaggagaggcaggcagaaggaggaatatagaagggaacacagatcaggaagtacagtactttgccttccgattatgtgttggggccccacctgccaaccatgttcccctgtccaagaaaaagcaggcaatgaagaaataaggcattaggccctccggaaccaggagcccaccacttcagccacagctgtgacactattctcgagttgtaactaaaactggcatatgaatctcacagcttcagtaattgtgtatgcatatataaacaaatacacactgtatatatgcatatatacactatatatatacatactgtatatatacattacactatatataatacatactgtatacatacatatacacacattgtgtatacatacatatacacacattgtgtatacatacatatacacactatatatacatatacacactgtatatgtatatgtatatacacacacaaattcatatatgacttttctcagaattgatcatttaaaattttttatctctagagattttcattaaattgaactttgagtttggttaccagttttgttttttcccttagtttggaatttccttatgaacaactattttaggtagagaaggaattatttcagatacccttatttaatgttacttgtataaagaaactatttgcaaaatatgcatccaacaagagcttaatatccaaggaactcaaacaatcaacaacaaaacccaaatccatcaaaaggtaggcaaaagataggaatagatatttttcaaaagaaaacatacagtggccaacaagtatgtgaaaaaatggtcaacatcactctaatcatcagagaaatgcaaacgaaacctgccatgagatattgtctccccgcagtcagaatggctgttattaaaaagttaaaaaaggctgggcatggtggctcacacctgtaatcccagcactttgggaggccaaggcaggtggatcacctgaagtcaggagttcgagaccagcctgaccaacatggtgaaaccccatctctactaaaaatacaaaaacttcagccggatgtggtggtgcgtgctgtaatcccacctacttgggaggctgaggcaggagaatcgcttgaacccaggaggcacaggttgcagtgagctgaaatcgtgcccctgcactccagcctgggtgacagcaagacttcatctcaaaaaaaaaaaaaaacccaacaaatattgaatatatttcatgccaaacactcttctgactgcttagactgcctcagtgaacaggagaggcaaagatggcatgaagttatattatgaaacggatttcatgaagtaaatattacattagttacatattcatatttcatattctgttctgagctaattattgcatatgataatagtttttttgttgttggttttttttttttgagacggagtcttgctctgttgcccaggctggagtgcaatggcgcaatctcggctcaccgcaacctccgcctcccgggttcaagcaattctcctgtctcagcctcccgagtgcctgggattacaggcatgcacccccacgcccggctaattttgtatttttagtagagacaggatttctccatgttgatcgggctgatctcgaactcctgatctcaagtgatccacccccctcggcctcccaaagtgctgggattacaggtgtgagccaccgagcccggccaataatgatttttttaagaaaatataaaagtagcttctgctgcaatatcttgattagatgtaaaacagttttaatggagcatgcttcagcatctcctgaagtaggaaagacagatgtaaacagtgaggttgggttgaaattatattaagttttaaatttttgataaggttttctgtttataatgagagtttctggatttttagaaatagattctgatgtggaaccttttcaagaatgtttaaggtatttttaatgccagctctaatctcaggcctcagatatgtaaaagtggaagtgaaaactggccaagaatgaagtatttcatatgctagtgtatatttttggtaatttcttaaaaatgtttccattttgaaaaacaaggtagacttgtatttggttcagcaacaaaattattttggtattatctctggtttctaatatctaaatcgtctttaaaatggcatctgtgatattattaaaaataaataaatcagctaatgaattaggcttgacaaaaatgccttcccagaagatagtttctctgctacttatggtcaatgggcttaacataggtaaaagttctcaaatctgctaaattggccgggcatggtggctcacgcctgtaatcccagcactttgggaggctgaggtgggcagatcacctgaggtgaggagtttaagatcagtctagccaacatggcaaaaccccatctctactaaaaaaaaaaatacaaaaattagccagacgtggtggcacacgcctgtaatcacagctagttgagaggctgaggcaggagaattgcttgaacctaggaagtggaggttgcagtgggccgagattgcaccactgcactccagcctgggcaacagagtaagactctgtctcaaaaaaaaaaaaaaaaaaaaaaagaaatctgctaagttcgtttctatccctcactttccctgcaagctcttcttcccctttctgggcaacatgtccttttctgctttaggcactccatgcccactttatttttcatgtttgccccttttttgaaaggaagaatctaatatcacttcagctttctgattggccagttccacttccaaaaatttatttgtttatgtaaacattttcagttttgtggtttctgatgatgtaatagaagaaattacggagacaggcaagcagaagggatggtttgcttttggagagggcagaggaaaccttgaaaccatactgattctgaggtctttcttagggaaggtaagtctattcataggaggaggtcagaagggaatcatcaaatccaattccccagtttctatttaattttattttattagagacagggtcttgctcggttgctgaggctggagtgcagtgatatgatcatagcctactgcagcctgcagccttgaacccctatgctcaaatgaccctctcacctcagcctacccagtagctaggactgtgggcatgtgccaccatgccctgctttgcctttttttttttttatttctcatagagacagggtttgctatgttgaccaggctccaaactttcaataaggaagataagatccagaaacacaaaatagtttaccaaaagtcacacagctatttttaacagagccaacatactaaatccacttttaccttatgggtcatttatttctctgcttcctgaagcaaccacccacaaaattatataaagaactgtattttaaaattcagtttcataagtaataacttggcttatatgcattgaaaaagagtggaagggtgtatgctaaaatgttaataggacattagctcaagtagaagaaataactcttaaaccaaaaatagaaataactcttaaacaagagttattaagagttaagaaataactcttataccagtaaatagaaagtatttgacacttacatttatacatttgctcactcattcatttgttttttttactttaaagaactgggatggataattggataaaattgtctgggtgtcagaatattactagtaccaaatgcaacttttcttcactcaagctgaatgtttatgaagaaattaaattgcgtataagagcagaaaaagaaaacacttcttcatggtatgaggttgactcatttacaccatttcgcaaaggtaagaaaaagttgctagctgaattatattctttagtaaatattaccagagcagttcactttccaagccattcatttgcatgatgcaaaatctaacatcttttaaaaagaacaaaaattcccttaaacctatatcttcttcctgctatggctccatttgtcctactttccctgtagtagtggttctcaaagagtgatcctcaaggccctttcagggggctgtaaagacaaagctatatttatgacaaatctaagacttagttgcctttttaatttttgttctttcttgtattcacagtggagttttccagaggaggctgtttgatgtgtgatgtggtgatatggtcactgatttaacatagaattcaatgtgaaattcatctgccttctttattaatccaaacattcaaaagatttggaaaaaaaatgtaaaacagcaccactctgaagtttctatgttccttttggcaaatgtttgttaccataaaataggtttatcattgttatttctttctttttttttttgagacagagttttgttcttgttgcccaggctggagtgcaatggcacaatcacggctcactacagcctctgcctcctgggttcaagtgactctcccgcctcagcctcccgagtacctgggattaccagcatgcatcaccatgcctggccaattttgtatttttagtagagacagggtttctccatgttggtcaggctgacctcaaactcccaacctcaggtgatctgcccacctcaacctcccaaagtgctgggattacaggcgtgagccaccatgcccagtccattgttatttcttaatggattaattagttaaaatggattgaaaactttaccagttttaatgtttaatatgctaatataaaaatatacagcccacataaataatggctgtttgggattctcgataattcctttaagaatgtaaaggagctgagtgtagtggcccacacctgtaattccaacactttgggaggctgaggtgggaggatcacttgaggccagaagttcaagaccaacctaggcaacatagtgagaccccatctctacaaaaaatatataaaaattagccaggcatggtggtgcacacctgtagtcccagctattcaggaagctgaagagggaggatcacttgagcctgggagatcaaggttgcagtgagctgtgtttgtgccactgcactccagcctgagcaacagagctagaccatatctcaaaaaaaagtggggatcctgagaccaaaaggtttgagaaccactgccctgtaccaagaatgatctgtactccctttctatactaatcttccaattccctgtcagccctctccattcaaattctgttcctcctcacttaaaaccactctttttggccaggcgcggtggctcacgcctgtaatcccagcactttgggaggccaaggcgggcagatcacgaggtcaggagatcgagaccatcctggctaacacggtgaaaccctgtctctactaaaaatacaaaaaaaaaaaaaaaaaaactagccgggcatggtggcgggagcctgtagtcccagctactcgggaggctgaggcaggagaatgacatgaacccgggaggcggagcttgcagtgagccgagatcgtgccactgcactccagcctgggcgacagagcgagactccgtctcaaaaaaaaaaaataaataaaccactcttctcaaggtcacagcagcctccacaatgccaagcaaattcccagtcctcttctggcttcatccctctgtagcatagatgtggtcatcactcagtttttcctttactggatctctgggacactgctctttcctggttctcctcctgctcattgatcgcttcatcttcccaacttttcagtgttagactgctgctgggctcagtcattgaacctcttctctttctgtatcactccactggtgatcttacagctttctatcctatctgtatgctcttaactcccagaagtggcaggcacatattaagtgctcagaattatttgttgaatgaaggttttggcattgtattaataaagttccatagtaattgttttgatttttttgcagctcagattggtcctccagaagtacatttagaagctgaagataaggcaatagtgatacacatctctcctggaacaaaagatagtgttatgtgggctttggatggtttaagctttacatatagcttagttatctggaaaaactcttcaggtgtagaagtaagcattatttttacctctgtttaatcgatgtgagagaaaaattaggcgaattaatcctaaaatttgactttatacttttttaaagaaccaacttatatttgtgttataggaaaggattgaaaatatttattccagacataaaatttataaactctcaccagagactacttattgtctaaaagttaaagcagcactacttacgtcatggaaaattggtgtctatagtccagtacattgtataaagaccacaggtaaggaagatgttttgttttagattcaataaatatataaacagattgtcaattttggcatcttccccatattgctgaagtttacatgataggtcaatatatgttaaaaacattgtaacatttacataagcaaaataaatgttacttgggatttttgtctcaaatagtaatgaaaattaattctacttaaaagttcaggctgggcgtagtggcccacgcctgtaatcccagcactttgagaggctgaggtagctggatcacttgaagccagaagttcgagaacagcctcgccaacatgggaaaaccccgtgtctactaaaaataattagctgggcgtggtggctcacgcctgtagtggtagctacttgggaggctgaggcacaagaatcccttgaacctgggaggtggaagttgcagtgagccaagatcgcgccactgcactccagtcgggagcaagggggacaaagagtaaggctccgtcttagaaaaaaaaaaaagttcaaatattttgtaatgacaaaacttttcatttgttcagaatccacatgaagcaggaggtagctgaactatgagttctgcaagtgggaagaaaaggtggggaagtagttgctagtagacaagttattgttcaagaaagcatacctttgtaagtggaatgttaaaatatgaaagtatcctgatacatttagtaacatctttccaataattaaggtcaagggcaggagctgggatttgtttattttaattgtaaatttcatatgcttttttttttaatcaaacattacggaagggtttaaagtgaagtcttcttctcccttcttatccccaattccattcactagagataagcattgcttagcagtttgtgtatatcctttcacaacttttttcaggatttatgtaagcatatacacagacccacagtttcttgggttttgttttttaaaattacaaaataaaatcttactagaagtattttacagcttgcttacttaacccagtgtgttggggatattctatatcactcaatacagatctattacgttcttcatttgatcttagccatctattgcattctttcttttttacttatttatttatttatttatttatttatttatttatttttgagacagagtctcactctcttgcccagaatggagtgcagtggctcaatctcggctcaccgcaacctctgcctcccagcttcaagcgattctcctgcctcagcctcccgagtagctgggattacaggcgtgtgccatcatgcctggctaatttttgtatttttagtagaaatggggtttcaccatgttggccaggcgcgtctcgaactcctgacctcaggtgatccatccacctcagcctcccaaagttctgggattacaggtgtgagccactgcgcccggcctgtagtctttcaaatggctgcatagtattacatagtgtgaatacaaaccatatttaactattaccttataatgataaaatgcgagcctttatcttcttgccagttatctcacttgagtaaaaatgtgtgcttttttttatctgttctttggcttctagttgaaaatgaactacctccaccagaaaatatagaagtcagtgtccaaaatcagaactatgttcttaaatgggattatacatatgcaaacatgacctttcaagttcagtggctccagtaagttccattccataaatttccttttgcccagtttgttttgattatgcttcttttcgctctgcatcagtcaccaggtccttgcacacagaatgaccgactgggaggtgggtacgatatattggaaacgtgagaaatctcatttctaaccccagttctgccagtaactaactggatgacattgagctaatcgcttaacctccatgggcctcaatttcttcacttgtaaaatagatggattctaatatctggggttcttactggcttaagaaaaaaaagaaagtgtaactagttgcatgtgttatttccccaatctggaagactcgacagttgaccctgatctttttctaagaactcacttcttccatgagtccttaaaatgatctcagtccactcacttgttcaattcaaaaaattagccttcctattttctttattactttagtggttttgacaaaattttgtagtagatacttcggtgggaaagaaagttggaaagaactatgttctatgtggttgagcagaggctagctaaacatggatgaagtccaggcgctgcataaatgaaagagaactggcctggtgcagtggcgcatgcctatcgtcccagctactcagtgggctgaggcaggaggattacttgaggccaggaattgaggctgcagtgttgtatgatcacacctgctagtagccgctgcactgcagcctgggcaacatagtgagacccccatctctaagcattaaaatttttaaaaagctgataaaagagaactgcatgtagtttatattgattggaaaattgtaggagatgaatagagaaaagagaagaggaaaattaagtagaaggaaaaatgggttatggggagaaaagagatggaaagaaagatatacattggtggcagaggagtagagagagcaaaggcaagtatagctaagacaggaaaggaaaagtcagaagaaactggaaagaaacagaaaaaatgagggagaagggaagtgtaagtaccgctatgatcaatttctatcttttagtgttaattttgaaccaagggtgactggtagaatgcaaatgcatttatgtgcatatgtgccccacaatgcatatataacctcacaaaccaatcaggaaactgttcagtagtcttttgtgtatacctcactttcagaagtgaataaataatagggtcaccaaatagataatgagaggtatttctgatagctgatctctaagcttcttttgggtacttaccatattgtacaaagcactgaagaaatggaaagagtcagcagaatcaaacgtggttcaaaaattgaaagcagttagccaacattgcaaagtgttgtgtggtttaggactaaagagtggtatacaaattataagggttgcagaaattgaaaatgtaaaggtgaataggggctaaagagaccaaagaagccataaggaaagagataaggtatgaacaaggccttgattgttaattcagattttttttaagtagacaactattagatgttagttttctgtgtctgtaactaattaccacagacttagcaacttaaacagctgtttattgtctcaaagtttctgtgagtcaggagtccaagcgtggcttagctggctcttctgctaagcagtcaaggagtcagtcattcatacaagacttgggggccgctcccaagctcacatgttgttggcagaatttatttctagagctcatggtggctcacttcttagaggccatcaggaagggagagtctgacctctagatccttttttttttttttttgagacggagtctcactctgtcacccagactggagtgcagtgacatgatctcagctcactgcaacctccgcgtcctgggttcaagtgattcttctgcctcagcctcccaagtagctgggactacaggtgtgcaccaccacacccagctaatttttgtagttttagtagaaacggggtttcaccgtattggccaggctggtctcgaactcctgacttcaggtgatccacccgcctcagcctcccaaagttctgggattataggcgtgaggcaccgcgctcagccattttttttgtatttttagtagagacggagtttctccatgtttgccaggctgttcgcaaactcctggccccaagtgatctgcccacctcagcctcccaaagtgctgggattagaggcatgagccaccatgcctggcctagatcctcttttaaggggttcatctgattaggtcaggcccacccagaatagtctctcatttgattcaactgatttgggaccttaattacatctgtgaaataccttctcttctgccacttaatgtaacctaattatgagaggagggcctccatcgtatttacaggtcctgcccatgctcaagaggaggggattatacaggatgtgtacaccagggggcaggaatcttgggggccatctcagaattttgccttctccagtggggaggatgtccttctagagtagcagaacatttggacaccaggtggcaatgggaagaaagctgaataagtagaatgggacaagattagggtcaacctcaggctgtcctgtaggcttttggggattttgtgttggggtgatagttaacctgagctctggatttgaggaaggtgcatgcggcgacatggtatgtgggagagtggactaaggagacactaaagagagataaggaaaccagtcaggaggctattagagttctgggcttgaactgagatgcttttagctgttggtttctgggcaagttacttaacctctttagtctcgtacttatacttgctcttataaccccgcagtgtgtctctattttagcacttaatcagtgtccattggtatgctggcgcatgtttagcagctggctttccagaaagaaaaagtcctattttgtagtgtttgctgatttttatgatataaatattcccaccatggccactttcaagccaccagcctgatgtccctgaatatggagttgggaacatatgcacagtagcacaccactatcatatagctacaatagataaagatagccccaagagcttagaaaataaaatgtagtaaaataattaggacaagatgaatttatttattacctctgtctttaaaacaattttttatttgcaaatttatataacttaatttttagtaatggtttttctttaaaaaccagtttgtattttaggaggccgaggtaggtggatcacctgaggtcaggagttcaagaccagcctggccaacatgacgaaaccccatctctactaaaaatacaaaaattaggcaggcctggtggcgtgcacctgtaatcccagctactcagggggacagaggcaggagaattgcttgaacccaggaggcagaggttgcagtgagccaagatcctaccactccactccagcctgggtgacagagcgagactcggtctcaaaaaaaaagccaaaaaaaataaaccagcttgcagcattcctggaaattctaactaacagatgttcttgcatattgatatgagccacctccagcagagcacaacatgaccacagtctggaacagtctttggttttcttttatgttagatgcatatctcttccattgtttgtgagtttcctgagtgtggatactatttatttctgtaaccttagcccctaacatagtgtctggcaattgtaaatacttaataaatatctaatgaatttaaaaaatatttgtcttaaaagcgcctttttaaaaaggaatcctggaaaccatttgtataaatggaaacaaatacctgactgtgaaaatgtcaaaactacccagtgtgtctttcctcaaaacgttttccaaaaaggaatttaccttctccgcgtacaagcatctgatggaaataacacatctttttggtctgaagagataaagtttgatactgaaatacaaggtaaggcagtagtttttactggagattgtaattctctggtgcaagtttttaaaattgtttttctaattgaacattatttctttacaaattttttctagctttcctacttcctccagtctttaacattagatcccttagtgattcattccatatctatatcggtgctccaaaacagtctggaaacacgcctgtgatccaggattatccactgatttatgaaattattttttgggaaaacacttcaaatgctgaggtaaaaagactgtatagtataattttgtaacttagagttataattatgatttgggtaaataaagcttgaatgtaaaatttgggggaaatttttaaactttatgtgggctggatgcagtggcctgtaatcccagcacttcaggaggccaaggcgagaggatcacttgagcctaagggtttgagaccagcctgggcaacatagggagaccctgtctcaataaaaattttaaaaaattagcctggtgtggtggcgtgcacctatattcccagctacttggggtgggagggtcacttgaacctgggaggtcaaggctgcagtgagccatgatcgtgccactgcactccagcctgggtgacagagtgactgacagcttgtctttaaaaaaaaaaaatgtgattaactcagatattaacaaaatgaagattatgagcatttttcatgttttgcactgtagagttatgggtgagctgcatctgggccccagtttgcttttaaaatacagattcctgagcctattgttactgaatcattatctctggggatggaactcaggaatttgcatttttaacatgattcccatgtattcatctaaacctgggattctcagcactattgacgtttgggctggatagttccttgggagggggctgtccagtgcagtgcaggatgcttggcaacattctggtttctgcctactagatgccagtagtgttccttcctagttgtgacaaccaaaaacatcttcagatattgtcaaatgtcccctggtggctcctccaaggggacaaaaattggttcttatgggacaaaagaatttatgtagtacagttgtttgttttcctccaaaaccattggaaagcattcttccaaagttcagctttgcccaacaaaatcttattccttagtatttaattttatgatgggggaaggattaggaaaaaattgcccaaaaagttgtttagttggggaggtaatgaaaaaagggttgacaaacactggtctaaaccctaaaattcagataccactgacaaagataatatataccgtcagataatatacgtgtttcccagatcacttccccctcgtggacttgtagtcaagaatcgacctttaaaactcctgtccagtcaggctggtaaattctttaacttcacctcattttctattggaaatctaagcaaattccattgatttggctgcttccctttttaattgtctgacaaccctgtaaccatagcttaatgtagcccattgagaattatggtcggttttcagatgtctgtagatcagacaaacctaaatttctatctcactgctaaactgtgtaaccttacgtacgcagggtgctttacctcttggagactttgcttcctcttctctgaagtggtggtaatcataacaactaaatttttcaaaaggatgtttataaggtttaaaaggaagtaacaaatatgaaaatacctagcacattgctggacaagtagtagagattcaataaattgtagttgccatcttaacctatactggataatatatcaataattgttactatagaaactcttattgaatacttatatgtaaggtactatgctaagtattgtacatgaattgtctcagtcattcttcaaaacaaccctgccggattatgtgattggttacattgctgtttggcaaatacttgggacggtgacttcttccctgcaccaccagaccgtagatgctggagcccaagtagatgtgctgagaacagaggccttaagtgtgcttgcagggtttggcttggctcttgcactgctcctatttgccaggaataaaatgtattccacatagtctctggtccaaggaggattagaggctgctggagctgacctaaaccccatgcacagcctccgtgggagctgcccagccagtctgtagacttgtgagtgagaaactacataatcgttttgtgagccactgaacgttaaggcagttttgttatctatatttttttattttattttattttattttttttttttttgagacaggttctcattctttttcccaggctggagtgcactcatgtgatgtcagctcactgcagcctcgacttcctgggcttaagtgatcctcccacctcagcttcccaagtagctgggactacaggcacatgccaccatgcctagctaattttttgtatttttgctaaagatggagtttcaccacgttgcccaggcttttttggtggtggtggtggtggttgttttggaaatagggatttcctcagcctcccaagtaacagagactacaggctcacaccaccatgcctggccaatttttttgaaatttcttgtacagacagagtctagctatgttgcccaggctcgtcttgaactcctgggctccagtgatcctcctgcttggcctcccaaagtgctgggattacaggtgtgacccaccggcttgttagacattattctggcgatagctgactgatacagatagcagcaataactgtcccgattttatagatcagggaatcaggtagagagaaattaaataatgcttgcaagaccacacagctgtaagtgatactcttaataaggcagtttgaggccaaaacccctactcttaaccattctgtcactaatcagaggtaatacaatggcaattaccccagacttggcatgtacttgtaaatcaattagaattctcttaggaatagatcatatgcttttttggcagcagcatttttaactttctgatttggttatagtggtgtatctaaaacaaatttatatttctcacacatatactctgtaatcccagcactttgggaggccaaggtgggtggatcacttgaggccaggagttcaagaccagcctgaacaacatggtgaaaccccatctctaccaaaaagaaaaaaaaattaggcgtggtggcatctgcatctgtaatcccaactactcaggagggtgaggcaggagaatcgcttgaacccaggaggcagagattgcagtgagcccagattgcaccactgcactctagcctgggtgacagagcgagactgtctcacaaaaaaaacaaaacaaaacaaaacaaaacaaaaaatacataccaactacgtgggagaggccaatgttagactgaacataaaaaattgagaaagcacatattccctgatttcttgaggtgactaaattttatcagtgatttaattatattttctagagaaaaattatcgagaaaaaaactgatgttacagttcctaatttgaaaccactgactgtatattgtgtgaaagccagagcacacaccatggatgaaaagctgaataaaagcagtgtttttagtgacgctgtatgtgagaaaacaaaaccaggtcagaatcttttattgtcttttttaaaaatgtagctagacataataaaagtaattctatactgtacattgaaaattgtaaaacattttctctttactgcaaaaaatatatagaaagaatgttttcttcatgaactacatgaatcaaaagtagactttttagaaaatatttgtaacgcttaactctcaagtcggtgttgttggatgctttatatttcatccagtatccctataattaatttccttaatgtatttctctttaacatttaataaaactattttaaatttttagaatataatccttaacataattatcatgtagaaatcacttagttcaattgtgagttttttaatgtgggaattggtttagtctcattttctattttacagtttctagtgttgaccggtagaggcttagtcacagaatatctattaaattttgctagttgtatggtgtaaaagtgctgaaggatacttgcatgtttggcctgtatgtcaatattgtatttctccctgaggatctcttacttcagttcccacgccaatctttaaatgtaaatgtcattgcctatggttgctgtggactcagtgctgccagaaatatttttaagagtattatttaatagattttatatttcctttcatatggctagtctttcacacagctgtcagcactgttaaggcatttgtatgtcaaaatatatgctaaatatcacgtatatctttttaggaaatacctctaaaatttggcttatagttggaatttgtattgcattatttgctctcccgtttgtcatttatgctgcgaaagtcttcttgagatgcatcaattatgtcttctttccatcacttaaaccttcttccagtatagatgaggtatgttactttttttatttttttgtcaacagctaggtaatgaacagaaaatgtgtttgatttcaacaggatatatgtaggttttcttgatatccagaaaataatagagactgatttgggtatcttcttcaaagctttagtcaattaactttaaaaacagtaatttcatgtaataacatagcatgagatagtaatgattgtccttaatttcatatttttctggcaattcctagattcactgtggcatttgttttaccgtttaaagcctgtgattcttggccaagcgtggtggctcacgcctgtaatcccagcactttgggaggctgaggcgggtgggtcacttgaggtcaggagttcgagaccagcctggtcaacatggagaaaccctgtctctactaaaaatataaaattagccgggcgtggtggcacatgcctgtaatcccagctactcgggaggctgaggcagggggatcgcttgaacctgggaggtggaggttgcagtgagccgaggtcatgccactgcactccagcctgggtgacagagcaagactctgtctctaaataagtaaataaagtctgtaatgtgattcttctcagtacagacagtcccaaacttacgctgtttcaatttgtgatgcgtttgtcagaacgtaattccattgtaagttaggagcatctgtatatatccagaagactaaaatattctatcagcgtagaaagtatattctatggatgaaatcatacaaaatgaaataactaaaaacatgagactttttttatgacacacatcacagttttttgtttggcacttctatgaagctagcatattaaatgaaagcactgaatggtgaaggcctaaacatagaatctgttcctgggaaaccatgtgctcatctagggtgggttttgtgaatttgagcaagtcactaagggcaggtaagcaagtacccttggctgtaaaccaccccatagaggtgttaggagcaaaggagttaaaccataagaaccttaccactctaaaaatgctccgtaaatattaacaattttactattatacccctgagtttttaaatgtcattcctgtgtactgtaatattcatagctattatttaaaatagacttaaaaactagttacaatagccaataatttctcaattgtgcttcttctggatatatatgtgttggatacaaacatttttattatttcaaaaaaaaaaagtcatgatcccagagtccgcccgctcctgtcctttcccgtgttcttccccgcctaccccgatggcacagtgtacctttcttaggtactcttcaaagactcaccacagaaggtactaagatatgagtgacctcactaatgatgcttttaaacattataaggcaattagtatgttcttaggcgactttttaatatgcatgccagaagataggttttctcagtaatggatgtaagaaactaaagctattacaactagaaaaggaatttttattattttaaataattgatttctactctttccctttttttaaattagtatttctctgaacagccattgaagaatcttctgctttcaacttctgaggaacaaatcgaaaaatgtttcataattgaaaatataagcacaattgctacagtagaagaaactaatcaaactgatgaagatcataaaaaatacagttcccaaactagccaagattcaggaaattattctaatgaagatgaaagcgaaagtaaaacaagtgaagaactacagcaggactttgtatgaccagaaatgaactgtgtcaagtataaggtttttcagcaggagttacactgggagcctgaggtcctcaccttcctctcagtaactacagagaggacgtttccctgtttagggaaagaaaaaacatcttcagatcataggtcctaaaaatacgggcaagctcttaactatttaaaaatgaaattacaggcccgggcacggtggctcacacctgtaatcccagcactttgggaggctgaggcaggcagatcatgaggtcaagagatcgagaccagcctggccaacgtggtgaaaccccatctctactaaaaatacaaaaattagccgggtgtggtggcgcgcgcctgttgtcttagctactcaggaggctgaggcaggagaatcgcttgaaaacaggaggtggaggttgcagtgagccgagatcacgccactgcactccagcctggtgacagcgtgagactctttaaaaaaagaaattaaaagagttgagacaaacgtttcctacattcttttccatgtgtaaaatcatgaaaaagcctgtcaccggacttgcattggatgagatgagtcagaccaaaacagtggccacccgtcttcctcctgtgagcctaagtgcagccgtgctagctgcgcaccgtggctaaggatgacgtctgtgttcctgtccatcactgatgctgctggctactgcatgtgccacacctgtctgttcgccattcctaacattctgtttcattcttcctcgggagatatttcaaacatttggtcttttcttttaacactgagggtaggcccttaggaaatttatttaggaaagtctgaacacgttatcacttggttttctggaaagtagcttaccctagaaaacagctgcaaatgccagaaagatgatccctaaaaatgttgagggacttctgttcattcatcccgagaacattggcttccacatcacagtatctacccttacatggtttaggattaaagccaggcaatcttttactatgcattaagacctctgattcaaaacttattagaacagtagcttctgctggaatttgcaatcactgaagtcatagaaaataggtaactatctaattagagaaataattgttgtattttaagatctgagagtgtgtacaagttttagtatacatgccatgccagaagatagtgtatgcaagaagtcttgggaccagaaaatggcaatgataggagactgacatagaagaagaatgcttccctaggaaaaaggtcgctggctttggtgcaagaggaagaagaatgttccactggaagcctgagcacctaatcagctctcagtgatcaacccactcttgttatgggtggtctctgtcactttgaatgccaggctggcttctcgtctagcagtattcagataccccttctgctcagcctgcttggcgttaaaatacaaatcattgaactgagggggaaaaatgtaactaggaagaaaaacccaatttaagaaattacataatgctttccaaaggcacctacaacttagttttaaattacttgctactggggattacccatggatatccttaataggcaggaagtctgggaattctggtggcctctagggcagtgttctcacagcaccgttccgacagggaccagtgaaagaaaagagacaaagttagaacgtgctggggagcggccatttctaaggccagtctggtttaagtagtcatttctgctgaaaaaacagatgatcctggtggaagaaaaggttgaaggcagctgccctcgggagggctgtgatgctcggcacatcctgcctggcacatacacgtgtctgcaggccacaccgtgcatgtccccagacctgccgcctggcttctggagtgcttcaagcagagcatggtgggtcattgaggagacccaggaatctcatctgagaacccactctctgccggagaaccccatggtgacacattttcatctttctgaccagaggctgtttttttttttttttgagacagtctcattctgttgcccaggctggagtgcagtggcttgatctcggctcactgcaacctcgcctcccgggttcaagcaattctctgccgcagcctccagagtagctgggataacaggtgcccaccaccacaccccactaatttttgtatttgtatttttagtagagatggggtttcaccatgttggtcaggctggtcttggactcctgacctcatgctccacccgcttcggcctcccaaagttctgggattacaggtgtgagccaccgtgcacggccggcctgacctttggaaaagccttgtcactttggacgtttgcgtctttgaagaggcgatgggagcatatcatgactgcctgccaccattgcttttcagactaccacaactcaatcatgctgtccaggacttctggccctgtgttcaccactgggaaaacgtacttcagactggatagcctaaaaaggagcaatgcccttgtaggatgtggagaagggaaaatacggacattaacattaaaagacaccagtgaaattgttaggtctctaggaagttggagcacaaggcttcacgctttaagaccatctgtggttttcagtgaacaagcgctgagcaccagcagcagaaaacaacaacaaaaaaacacctcgtttttaccttgtcttctagacatgaaaaggcagttgcattccactctgcattatgttctacatgttgctttatcagtatatgcttagctgtaagtgacaagtattttttctgaacagaagtttacttagaaataccatgcacttgggggtaccaattaaccgcctgaaaattagcatattgatagttcttagagagaccagatataatctaagaatttatatgaaagatttgtatcattagagccagaaataattttatattaatatataatacagattaacattatatataatatgtacctgtgtcacttctgacatgagcctgtaaacatatattcatatatgtacctgcacatgtacccacctgatgtaggtcttattcctttagtatggacttaaagtacttattcatataccttgtaactaaaaattagaacagctccctagaattgtgaacttttaagagtctgactagaaatttgcaacttataaaaaagttacttttaaaaatataagttagggctaggcacagtggctcatgcctataatctcagcacttttgggaggccaagacaggaggatcacttcaggccaggagttcaagatcaaccaacctgggtaacatggccagaccccatctctatttatatatatatatataaaacttagagtttttatcttcccctaaaagaggccgtgatatttgcagcagcctcaaattgctcttaaggggtttaggtgtgcagaagctttcctttccctacccagtaaccatgtgactactaacgtggtatattgatttattttgtttgctgtctgtctcccctgccccactgctggaacagaggctccaagaaaacagggaccttattattcattactgcatccccagtaatgaaagtacttagaaaataattattgaatgaatgaaatctaaactgtgaacctgagggtgtttgtggcagtgtttgttttactgaattgtagaaggacataaccgtgttttcagtgtttctatggaacaaacttgtacattttatttcacttgtgttttgtcttaaaccctactgctggaaacaattttatgtaataagcaatgggcccaaaagtctaggagtttttttgtacttagtgaatttgtatgcaacagagatgctgcagctgatgcctttaaaaggtattcatcatggaagagctgaggcctgtgcttggtgttccagagcccagggttgagcatcctgaaggagccactgcagccgtcactgtccccagagcctgtggagatagagcctgtttgctgctttttcttcccgctcttaagacatggctggagctcagtcttcattgaatgaagtttgctgtggtattgcatagccttgctttcttgaactaaactgtttgcccttcacaagtagttcttctttcaggattagttcgttccaaggaggctcttcagtctcacagataagtagatctctcctgctgtctggacacatttcactcggaaattgaatacaatttgtattcaggctgggaacctgaacacacacttgtgtttttaagcttcccttttttacagtggacaaggacacaaataataaataaatcatccctaatgcccaagaaatgccctggtacttagtaataacaaaataccagtaacttccagttgtttctcactaccttttttcttgagtaggatgataatagaattacaactcttgagggcaacataaatataggtggatatttgtggtatgatattgatggaaaaatagcaatctttttctttacctgaggggaacaaaggcaagaggagaattcgatagttctcataacaaaggatttctgagttttcctcccctttctgtgatctgtctccacttggaactcatgttctagcaaaggacattttgtgggtgaagaagtgattaatgattaggatgaagaaaatgttggcagttccagcctggccaacatggtgaaaccccgtctctactaaaaatacaaaaattagccaagcatggtggcatgtgcctgtaatcccagctactggggaggctgaggcaggagaatcgattgaacccgggaggcggaggttacagtgagctaagatcgcaccactgcactccaggctgggcgacagagcgagactccatctcaaaagaaaaaaaatgttggcagagaagatgttctgttgtttttttttttttttaaggtcttgagaaaagggaggaagttgaaaaattttatcactcaatagctggattaaattaaacattacgtctcacagtgactcaccacccttgagcctccctcccagattttctggatacatcaaagttaagaagaaaaacctattttcctatctttccagtaaaaggacccttttttctaaacatagtccttaaatatataataggctttttgtgtacttgactctgttgtctattcccaaattttataatacttttaatattctggaattgtacttagagagattattctaaatgttgtagtataaaagtacatcatccactctgaaatctccctaaaagaactccactgcatacacgtggagaagtcatcatgccccatctgtgtctgtacctgcgggtgtgtctagcatgctccctagggaagggattttataccatttgcttatatttatttggcaagctccatgaaaacaaggactgttttttaactttgtggctgacacttggttgcctaagtgtttaacggtgattgagcggggacgttgacggtacaaacactgattgaatttaccactggagggcaacaagtcaccctgttcaggctgacaatcggttactattcaataattccattcccagaagatacgccaagtatgtttatacaggtggtttcttaaagttctgtttgtgattatctcgtcttgagcaaatgaggaaaggatgtgaagaatctggtgtccccatgatctcacccagaaatggtttggtagttacaaagcaagatagagcagttgagcaaatacttagcccatctagtcctctaccactaccaccttcgccttttaatgagcaggactttgtagtaagcgagttgttgaaaaggagctccacatacttagtaacagcctcggagcggatggaaagaagtaggcattgctgcagagctgagatgaacctgcaaggagacagccttggccccagggaatgatcactgcactgcgccccctactggcctggctgagatgactagctgtgattccctccttagtctcacctgttgaagatggcgcagaacagttacagccatgatcaaaaaagataattaatactttagtgtctcctgccctatccgcccccagggagaggccagaccattcagggtgccagctggaggttataagggtggagtgtggagacagtgtttcgtgtcactacttcctttttttttttttttttttttttttttgagacagagttttgctcttgtcgcccaggctggagtgcggtggggcgatctcggctcactccaactttcacctcccaggttcaagcaattctcctgcctcagcctgctgaatagctgggattacaggcgcctgccaccacgcccaactaatttttctatttttagtagagagcttcctgatagctgaacatgcagaggctgctgggaagggcatagaatctctgcagtccttctcacataccttatcctatgtatctcttcatctgtatcctttgtaatagccttcataataaaccggtaaacataagttagtgtttcctctagttctgttaggcaatctagcaaatcagttgaacacaaggagggggccatgggaccctcaatttatagtcattcagtcataacaggtaaaacctggggcttgcaattggcatcggaaataagggggcagtcttgtgggaatgagctctcaacctgtgagattgaagcagcatggttgtctggggtaatacgtgtggtttgttgccccacgccaaggaaatcgaggatggggacacaaaaggagtgggttcaagagcggaagtttagcaggcaaaagaaagaagagaccttccctgtgcagaggaaggagtcccgaacaggtttccgggtttacagcgagatgcggttgcttttatagatgagcttgaggaagcggtgtcttatttacgtagggcacagaggattggttggaccaggtgttccatttacatagcacaggaagaggctggccatcccaccctcatctgttattatgcaaatggcacctctacctagcccaggccttgttgcctgcttttttactgcacacgtggcaacaaagaaaagggaaaagggaacttcaatattgaatatacctgacttccaagtatccctttcctattggcacagctgctggcattcgcctatgcaagcttccagtttgcttatctatgtttgcagcttgagttttcaggctctttttgttagaaaagaaatgatttggggcttctttttattaaaaggcaaaccttactgaggactcttttatcctcactaactgcctaaataaattttgtttaggtgttgtatcaggatctgatgctatctccaggtagacagtgtcagaattaaataggaggatacccaaccagtgtctgctgcagaattgattgccttcttgttaatggggagaaatcactacgcatttggtcacagaagtcttctgtgtttattgttgtggcatgagagcagaggaaaaacggtttgagatttttcccctcaaaaacataggggaaatcttcatgatattggacttggcaatgatttattggctatgacaccaaaagcacagacaacaaaaacaaaagtagacaaatgggactacatcaaacttaaaaacttctgcatataaaaggaaataatcaatggaaaagacaacctttggaattggaaaaattatttgcaaaatatttgctttgatagattagcagataaaatgtggtgttcacatgccacggaatattattcagcctttaaaaagaaggaaattctgaggccgggcgtggtggctcacgcctgtaatcccaggactttgggaggccgaggcgggcagatcacgaggtcaggagatcgagaccatcctggctaacacggtgaaaccccgtctctactaaaaatacaaaaaattagccgggcgtggtggagggtgcctgtagtcccagctactcgggaggctgaggcaggagaatggcgtgaacccgggaggcggagcttgcagtgagccgagatcgcaccactgcactccagcctgggcgacaaagtgagactccgtctcaaaaaaaaaaaaaaaaaaaaaaaaggaaattctgtcatgtgctacaacataggtgaagcttgaggacattatgtatgctatgtgaaataggccagcaacaaaaatataaataccatgtgattctacttacatgaggtttctaaagcaatctaatttctagagacagaaattagaccgatgattgctggcggctcaaggaaggggaaaatggagagttgttcagtggctataaagcttcagtttttcaagatgaaaaagttctgaaaataggtaatactactgaattgtatgtgtaaaatggttaagatagtaatttttttttttttaagagacagggtttcactctgttgtccagactggcctcaaacttctatctcaagcgatccttccgcctcagcatctggagtagctgggactataggtgtgcaccaccacacccagctttaaaaaggtcactattttacttatttatttttaattagggcagacttaacagtaagtgattcatccttggtttctgatacattatttcctcctttttctaaaggaagtctgctctctgccattattttatctgcccagaatacaagtatagtaacgtcttattacaagctatacaaatcctttttcaaagtgagtgtgcagactgggcttggcggctcacgcttgtaatcccagcaatttgggaggctgaggtgggtgaatcacttgaggccaggagtttgagatcagcctggccaacatgatgaaaccccatctctact
